(19) United States
(12) Patent Application Publication
(10) Pub. No.: US 2021/0380658 A1
(43) Pub. Date: Dec. 9, 2021

(54) CHIMERIC ANTIGEN RECEPTOR SPACERS

(71) Applicant: Lyell Immunopharma, Inc., South San Francisco, CA (US)

(72) Inventors: Marc Joseph LAJOIE, Seattle, WA (US); Brian Douglas WEITZNER, Seattle, WA (US); Scott Edward BOYKEN, Seattle, WA (US); Spencer PARK, Seattle, WA (US); Yun SONG, Seattle, WA (US)

(73) Assignee: Lyell Immunopharma, Inc., South San Francisco, CA (US)

(21) Appl. No.: 17/318,996

(22) Filed: May 12, 2021

Related U.S. Application Data
(60) Provisional application No. 63/023,751, filed on May 12, 2020.

(51) Int. Cl. C07K 14/725; C07K 16/30; A61K 35/17; C07K 7/06; A61P 35/00

(52) U.S. Cl. CPC C07K 14/7051; C07K 16/30; A61K 38/00; C07K 7/06; A61P 35/00; A61K 35/17

(57) ABSTRACT

The present disclosure related to chimeric antigen receptors (CARs) comprising immunoglobulin (Ig) derived spacers, e.g., hinge or loop regions, fragments thereof, or combinations thereof. Ig derived spacer confers improved properties to the CARs, e.g., increased cytokine release with respect the CARs with spacers not derived from hinge regions and fragments thereof, loop regions from constant domains and fragments thereof, and combinations thereof. Also provided are cells expressing CARs comprising Ig derived spacers regions and methods to use the CARs to treat diseases or disorders, e.g., cancer. Some of the disclosed Ig derived spacers are fragments from, e.g., IgA1, IgA2, IgD, IgE, IgG1, IgG2, IgG3, IgG4, or IgM. In some aspects, the disclosed Ig derived spacers are derived from non-human immunoglobulins, e.g., mouse immunoglobulins such IgG2A. Other Ig derived spacer disclosed are modular constructs comprising several concatenated Ig hinges or fragments thereof.

### CROSS-REFERENCE TO RELATED APPLICATIONS

[0001] This application claims the priority benefit of U.S. Provisional Application No. 63/023,751, filed on May 12, 2020, which is herein incorporated by reference in its entirety.

### REFERENCE TO SEQUENCE LISTING SUBMITTED ELECTRONICALLY

[0002] The content of the electronically submitted sequence listing in ASCII text file (Name: 4385_0160002_Seqlisting_ST25.txt; Size: 2,351,479 bytes; and Date of Creation: May 12, 2021) filed with the application is herein incorporated by reference in its entirety.

### TECHNICAL FIELD

[0003] The present disclosure provides chimeric antigen receptors (CAR) comprising a spacer derived from immunoglobulin hinge or constant regions.

### BACKGROUND ART

[0004] Adoptive immunotherapy using chimeric antigen receptor (CAR) expressing T cells is a promising cancer treatment, because these cells can directly recognize and kill antigen-expressing tumor cells in a human leukocyte antigen (HLA)-independent manner. However, besides a careful choice of the target tumor associated antigen, this therapeutic approach is highly dependent on the optimal molecular design of the CAR.

[0005] Accordingly, there is a need for methodologies that allow the systematic optimization of the extracellular spacer in CARs to allow for maximum CAR T cell efficacy.

### BRIEF SUMMARY

[0006] The present disclosure provides a polynucleotide encoding a CAR comprising (i) an antigen-binding domain that binds to an epitope on a tumor antigen expressed on a target cell; (ii) a transmembrane domain; (iii) an intracellular domain; and, (iv) a CAR spacer located between the antigen-binding domain and the transmembrane domain comprising an amino acid sequence derived from a human immunoglobulin hinge and/or constant region or a functional fragment thereof, wherein (a) the spacer is between about 150 amino acids and about 125 amino acids in length; and, the distance between the epitope and the surface of the target cell membrane is less than about 10 Å; (b) the spacer is between about 125 amino acids and about 100 amino acids in length; and, the distance between the epitope and the surface of the target cell membrane is less than about 10 Å; (c) the spacer is between about 100 amino acids and about 75 amino acids in length; and, the distance between the epitope and the surface of the target cell membrane is less than about 10 Å; (d) the spacer is between about 75 amino acids and about 36 amino acids in length; and, the distance between the epitope and the surface of the target cell membrane is less than about 15 Å; (e) the spacer is between about 35 amino acids and about 21 amino acids in length; and, the distance between the epitope and the surface of the target cell membrane is between about 15 Å and about 25 Å; (f) the spacer is between about 20 amino acids and about 16 amino acids in length; and, the distance between the epitope and the surface of the target cell membrane is between about 25 Å and about 35 Å; (g) the spacer is between about 15 amino acids and about 11 amino acids in length; and, the distance between the epitope and the surface of the target cell membrane is between about 35 Å and about 45 Å; or, (h) the spacer is between about 10 amino acids and about 5 amino acids in length; and, the distance between the epitope and the surface of the target cell membrane is more than about 45 Å.

[0007] The present disclosure also provides a polynucleotide encoding a CAR comprising (i) an antigen-binding domain that binds to an epitope on a tumor antigen expressed on a target cell; (ii) a transmembrane domain; (iii) an intracellular domain; and, (iv) a CAR spacer located between the antigen-binding domain and the transmembrane domain comprising an amino acid sequence derived from a human immunoglobulin hinge and/or constant region or a functional fragment thereof, wherein (a) the spacer is between about 450 Å and about 375 Å in length; and, the distance between the epitope and the surface of the target cell membrane is less than about 10 Å; (b) the spacer is between about 375 Å and about 300 Å in length; and, the distance between the epitope and the surface of the target cell membrane is less than about 10 Å; (c) the spacer is between about 300 Å and about 225 Å in length; and, the distance between the epitope and the surface of the target cell membrane is less than about 10 Å; (d) the spacer is between about 225 Å and about 100 Å in length; and, the distance between the epitope and the surface of the target cell membrane is less than about 15 Å; (e) the spacer is between about 100 Å and about 60 Å in length; and, the distance between the epitope and the surface of the target cell membrane is between about 15 Å and about 25 Å; (f) the spacer is between about 60 Å and about 45 Å in length; and, the distance between the epitope and the surface of the target cell membrane is between about 25 Å and about 35 Å; (g) the spacer is between about 45 Å and about 30 Å in length; and, the distance between the epitope and the surface of the target cell membrane is between about 35 Å and about 45 Å; or, (h) the spacer is between about 30 Å and about 15 Å in length; and, the distance between the epitope and the surface of the target cell membrane is more than about 45 Å.

[0008] In some aspects, (a) the distance between the epitope and the surface of the target cell membrane is less than about 10 Å and the spacer is 125, 126, 127, 128, 129, 130, 131, 132, 133, 134, 135, 136, 137, 138, 139, 140, 141, 142, 143, 144, 145, 146, 147, 148, 149 or 150 amino acids in length; (b) the distance between the epitope and the surface of the target cell membrane is less than about 10 Å and the spacer is 100, 101, 102, 103, 104, 105, 106, 107, 108, 109, 110, 111, 112, 113, 114, 115, 116, 117, 118, 119, 120, 121, 122, 123, 124 or 125 amino acids amino acids in length; (c) the distance between the epitope and the surface of the target cell membrane is less than about 10 Å and the spacer is 75, 76, 77, 78, 79, 80, 81, 82, 83, 84, 85, 86, 87, 88, 89, 90, 91, 92, 93, 94, 95, 96, 97, 98, 99 or 100 amino acids in length; (d) the distance between the epitope and the surface of the target cell membrane is less than about 15 Å and the spacer is 36, 37, 38, 39, 40, 41, 42, 43, 44, 45, 46, 47, 48, 49, 50, 51, 52, 53, 54, 55, 56, 57, 58, 59, 60, 61, 62, 63, 64, 65, 66, 67, 68, 69, 70, 71, 72, 73, 74 or 75 amino acids in length; (e) the distance between the epitope and the surface of the target cell membrane is between about 15 Å and about 25 Å and the spacer is 21, 22, 23, 24, 25, 26, 27, 28, 29, 30, 31, 32, 33, 34 or 35 amino acids in length; (f) the distance between the epitope and the surface of the target cell membrane is between about 25 Å and about 35 Å and the spacer is 16, 17, 18, 19 or 20 amino acids in length; (g) the distance between the epitope and the surface of the target cell membrane is between about 35 Å and about 45 Å and the spacer is 11, 12, 13, 14, or 15 amino acids in length; or, (h) the distance between the epitope and the surface of the target cell membrane is more than about 45 Å and the spacer is 5, 6, 7, 8, 9 or 10 amino acids in length.

[0009] In some aspects, (a) the distance between the epitope and the surface of the target cell membrane is less than about 10 Å and the spacer is about 450 Å, about 440 Å, about 430 Å, about 420 Å, about 410 Å, about 400 Å, about 390 Å, about 380 Å or about 375 Å in length; (b) the distance between the epitope and the surface of the target cell membrane is less than about 10 Å and the spacer is about 375 Å, about 370 Å, about 360 Å, about 350 Å, about 340 Å, about 330 Å, about 320 Å, about 310 Å, or about 300 Å in length; (c) the distance between the epitope and the surface of the target cell membrane is less than about 10 Å and the spacer is about 300 Å, about 290 Å, about 280 Å, about 270 Å, about 260 Å, about 250 Å, about 240 Å, about 230 Å, or about 225 Å in length; (d) the distance between the epitope and the surface of the target cell membrane is less than about 15 Å the spacer is about 225 Å, about 220 Å, about 210 Å, about 200 Å, about 190 Å, about 180 Å, about 170 Å, about 160 Å, about 150 Å, about 140 Å, about 130 Å, about 120 Å, about 110 Å, or about 100 Å in length; (e) the distance between the epitope and the surface of the target cell membrane is between about 15 Å and about 25 Å and the spacer is about 100 Å, about 95 Å, about 90 Å, about 85 Å, about 80 Å, about 75 Å, about 70 Å, about 65 Å, or about 60 Å in length; (f) the distance between the epitope and the surface of the target cell membrane is between about 25 Å and about 35 Å and the spacer is about 60 Å, about 55 Å, about 50 Å, and about 45 Å in length; (g) the distance between the epitope and the surface of the target cell membrane is between about 35 Å and about 45 Å and the spacer is about 45 Å, about 40 Å, about 35 Å, or about 30 Å in length; or, (h) the distance between the epitope and the surface of the target cell membrane is more than about 45 Å and the spacer is about 30 Å, about 25 Å, about 20 Å, or about 15 Å in length.

[0010] The present disclosure also provides a polynucleotide encoding a CAR comprising (i) an antigen-binding domain that binds to an epitope on a tumor antigen expressed on a target cell; (ii) a transmembrane domain; (iii) an intracellular domain; and, (iv) a CAR spacer located between the antigen-binding domain and the transmembrane domain comprising an amino acid sequence derived from a human immunoglobulin hinge and/or constant region or a functional fragment thereof, wherein the spacer comprises an amino acid sequence of formula C_{N}—(X₁PRX₂P)ₘ-[L-(X₁PRX₂P)]ₙ—C_{C} wherein: (a) the spacer is located between the ligand-binding domain and the transmembrane domain of the CAR; (b) the spacer has a length of at least 15 amino acids; (c) m is an integer selected from 0 or 1; (d) n is an integer between 1 to 20; (e) L is a linker polypeptide sequence; (f) C_{N} is an optional N-terminal capping sequence; (g) C_{C} is an optional C-terminal capping sequence; and, (h) X₁ and X₂ are independently selected from cysteine, glycine, alanine, or serine.

[0011] In some aspects, the spacer comprises two, three, four, five, or six X₁PRX₂P motifs. In some aspects, X₁PRX₂P comprises at least one cysteine. In some aspects, X₁PRX₂P is SEQ ID NO:4749. In some aspects, the L comprises a polypeptide of SEQ ID NO: 4223 or a fragment or variant thereof. In some aspects, when n>1, all L are identical. In some aspects, when n>1, at least one L is different from the other L. In some aspects, the C_{N} comprises a polypeptide of SEQ ID NO: 4088 or a fragment or variant thereof.

[0012] In some aspects, the C_{C} comprises a polypeptide of SEQ ID NO: 4533 or a fragment or variant thereof. In some aspects, the CAR spacer comprises the sequence of formula (CPRCP)ₒ(EPKSCDTPPPCPRCP)ₚ, wherein o is an integer which is 0 or 1, and p is an integer which is 1, 2 or 3, wherein CPRCP is the sequence set forth in SEQ ID NO:4740, and wherein EPKSCDTPPPCPRCP is the sequence set forth in SEQ ID NO: 4477.

[0013] In some aspects, the CAR spacer comprises an amino acid sequence at least about 70%, at least about 75%, at least about 80%, at least about 85%, at least about 90%, at least about 95%, at least about 96%, at least about 97%, at least about 98%, at least about 99%, or about 100% sequence identity to a sequence selected the group consisting of SEQ ID NOS: 2813, 2903, 2983, 3358, 3728, and 4477.

[0014] In some aspects, the CAR spacer comprises a C_{C} capping sequence comprising a subsequence of the polypeptide of SEQ ID NO: 4533 or a fragment or variant thereof. In some aspects, the subsequence of the polypeptide of SEQ ID NO: 5 is the N-terminal AP. In some aspects, the CAR spacer comprises an amino acid sequence at least about 70%, at least about 75%, at least about 80%, at least about 85%, at least about 90%, at least about 95%, at least about 96%, at least about 97%, at least about 98%, at least about 99%, or about 100% sequence identity to a sequence selected from the group consisting of SEQ ID NOS 4833, 4834, 4835, 4836, 4837, and 4838.

[0015] In some aspects, the CAR spacer comprises a C_{N} capping sequence comprising a subsequence of the polypeptide of SEQ ID NO:4088 or a fragment or variant thereof. In some aspects, the CAR spacer comprises an amino acid sequence at least about 70%, at least about 75%, at least about 80%, at least about 85%, at least about 90%, at least about 95%, at least about 96%, at least about 97%, at least about 98%, at least about 99%, or about 100% sequence identity to the amino acid sequence of SEQ ID NO: 4833.

[0016] The present disclosure also provides a polynucleotide encoding a CAR comprising (i) an antigen-binding domain that binds to an epitope on a tumor antigen expressed on a target cell; (ii) a transmembrane domain; (iii) an intracellular domain; and, (iv) a CAR spacer located between the antigen-binding domain and the transmembrane domain comprising an amino acid sequence derived from a human immunoglobulin hinge region or a functional fragment thereof, wherein the spacer comprises an amino acid sequence of SEQ ID NO: 4841.

[0017] The disclosure also provides a polynucleotide encoding a CAR comprising (i) an antigen-binding domain that binds to an epitope on a tumor antigen expressed on a target cell; (ii) a transmembrane domain; (iii) an intracellular domain; and, (iv) a CAR spacer located between the antigen-binding domain and the transmembrane domain comprising an amino acid sequence derived from a human immunoglobulin hinge region or a functional fragment thereof, wherein the spacer comprises an amino acid sequence at least about 70%, at least about 75%, at least about 80%, at least about 85%, at least about 90%, at least about 95%, at least about 96%, at least about 97%, at least about 98%, at least about 99%, or about 100% sequence identity to SEQ ID NO: 4839.

[0018] Also provided is a polynucleotide encoding a CAR comprising (i) an antigen-binding domain that binds to an epitope on a tumor antigen expressed on a target cell; (ii) a transmembrane domain; (iii) an intracellular domain; and, (iv) a CAR spacer located between the antigen-binding domain and the transmembrane domain comprising an amino acid sequence derived from a human immunoglobulin hinge region or a functional fragment thereof, wherein the spacer comprises an amino acid sequence of formula (EX₃KX₄X₅X₆X₇DTX₈X₉X₁₀TCPRCP)q, wherein q is an integer between 1 and 10, and wherein: X₃ is L or P; X₄ is T or S; X₅ is P or C; X₆ is L, or none; X₇ is G, or none; X₈ is T or P; X₉ is H or P; and, X₁₀ is T or P.

[0019] Also provided is a polynucleotide encoding a CAR comprising (i) an antigen-binding domain that binds to an epitope on a tumor antigen expressed on a target cell; (ii) a transmembrane domain; (iii) an intracellular domain; and, (iv) a CAR spacer located between the antigen-binding domain and the transmembrane domain comprising an amino acid sequence derived from a human immunoglobulin hinge region or a functional fragment thereof, wherein the spacer comprises at least one amino sequence A of SEQ ID NO: 4466 and/or at least one amino acid sequence B of SEQ ID NO: 4477, wherein the amino acid sequence of the CAR spacer corresponds to the formula A, B, AB, ABB, ABBB, ABBBB, ABBBBB, AA, AAA, AAAA, AAAAA, BB, BBB, BBBB, or BBBBB.

[0020] The present disclosure also provides a polynucleotide encoding a CAR comprising (i) an antigen-binding domain that binds to an epitope on a tumor antigen expressed on a target cell; (ii) a transmembrane domain; (iii) an intracellular domain; and, (iv) a CAR spacer located between the antigen-binding domain and the transmembrane domain comprising an amino acid sequence derived from a human immunoglobulin hinge and/or constant region or a functional fragment thereof, wherein the spacer comprises an amino acid sequence selected from the sequences in TABLE 11 or at least about 70%, at least about 75%, at least about 80%, at least about 85%, at least about 90%, at least about 95%, at least about 96%, at least about 97%, at least about 98%, at least about 99%, or about 100% sequence identity to a sequence in TABLE 11.

[0021] In some aspects, the spacer further comprises an N-terminal subsequence comprising 1, 2, 3, 4, or 5 IgG3 CH1 C-terminal domain amino acids and/or a C-terminal subsequence comprising 1, 2, 3, 4, or 5 IgG3 CH2 N-terminal domain amino acids. In some aspects, the N-terminal subsequence comprising 1, 2, 3, 4, or 5 IgG3 CH1 C-terminal domain amino acids and/or C-terminal subsequence comprising 1, 2, 3, 4, or 5 IgG3 CH2 N-terminal domain amino acids comprises an amino acid sequence selected from the sequences in TABLE 12.

[0022] The present disclosure also provides a polynucleotide encoding a CAR comprising (i) an antigen-binding domain that binds to an epitope on a tumor antigen expressed on a target cell; (ii) a transmembrane domain; (iii) an intracellular domain; and, (iv) a CAR spacer located between the antigen-binding domain and the transmembrane domain comprising an amino acid sequence derived from a human immunoglobulin hinge and/or constant region or a functional fragment thereof, wherein the spacer comprises an amino acid sequence comprising at least five, six, or seven consecutive amino acids SEQ ID NO: 1.

[0023] In some aspects, the spacer comprises an amino acid sequence at least about 70%, at least about 75%, at least about 80%, at least about 85%, at least about 90%, at least about 95%, at least about 96%, at least about 97%, at least about 98%, at least about 99%, or about 100% sequence identity to a sequence selected from the group consisting of SEQ ID NOS: 2015, 1889, 1768, 4852,and any combination thereof.

[0024] The present disclosure also provides a polynucleotide encoding a CAR comprising (i) an antigen-binding domain that binds to an epitope on a tumor antigen expressed on a target cell; (ii) a transmembrane domain; (iii) an intracellular domain; and, (iv) a CAR spacer located between the antigen-binding domain and the transmembrane domain comprising an amino acid sequence derived from a human immunoglobulin hinge and/or constant region or a functional fragment thereof, wherein the spacer comprises an amino acid sequence selected from the sequences in TABLE 1 or at least about 70%, at least about 75%, at least about 80%, at least about 85%, at least about 90%, at least about 95%, at least about 96%, at least about 97%, at least about 98%, at least about 99%, or about 100% sequence identity to a sequence in TABLE 1.

[0025] In some aspects, the CAR spacer further comprises (i) an N-terminal subsequence comprising 1, 2, 3, 4, or 5 IgD CH1 C-terminal domain amino acids and/or (ii) a C-terminal subsequence comprising 1, 2, 3, 4, or 5 IgD CH2 N-terminal domain amino acids. In some aspects, the IgD CH1 and CH2 sequence C-terminal domain amino acids and/or IgD CH1 and CH2 sequence N-terminal domain amino acids comprise an amino acid sequence selected from the sequences in TABLE 2.

[0026] The present disclosure also provides a polynucleotide encoding a CAR comprising (i) an antigen-binding domain that binds to an epitope on a tumor antigen expressed on a target cell; (ii) a transmembrane domain; (iii) an intracellular domain; and, (iv) a CAR spacer located between the antigen-binding domain and the transmembrane domain comprising an amino acid sequence derived from a human immunoglobulin hinge and/or constant region or a functional fragment thereof, wherein the spacer comprises an amino acid sequence comprising at least five, six, or seven consecutive amino acids of SEQ ID NO: 2560.

[0027] In some aspects, the spacer comprises an amino acid sequence selected from the sequences in TABLE 3 or at least about 70%, at least about 75%, at least about 80%, at least about 85%, at least about 90%, at least about 95%, at least about 96%, at least about 97%, at least about 98%, at least about 99%, or about 100% sequence identity to a sequence in TABLE 3. In some aspects, the spacer comprises an amino acid sequence at least about 70%, at least about 75%, at least about 80%, at least about 85%, at least about 90%, at least about 95%, at least about 96%, at least about 97%, at least about 98%, at least about 99%, or about 100% sequence identity to a sequence selected from the group consisting of SEQ ID NOS: 4847, 4845, 4846, 2560, 4844, and any combination thereof.

[0028] In some aspects, the spacer further comprises an N-terminal subsequence comprising 1, 2, 3, 4, or 5 IgA1 CH1 C-terminal domain amino acids and/or a C-terminal subsequence comprising 1, 2, 3, 4, or 5 IgA1 CH2 N-terminal domain amino acids. In some aspects, the N-terminal subsequence comprising 1, 2, 3, 4, or 5 IgA1 CH1 C-terminal domain amino acids and/or C-terminal subsequence comprising 1, 2, 3, 4, or 5 IgA1 CH2 N-terminal domain amino acids comprises an amino acid sequence selected from the sequences in TABLE 4.

[0029] The present disclosure provides polynucleotide encoding a CAR comprising (i) an antigen-binding domain that binds to an epitope on a tumor antigen expressed on a target cell; (ii) a transmembrane domain; (iii) an intracellular domain; and, (iv) a CAR spacer located between the antigen-binding domain and the transmembrane domain comprising an amino acid sequence derived from a human immunoglobulin hinge and/or constant region or a functional fragment thereof, wherein the spacer comprises an amino acid sequence comprising at least five, six, or seven consecutive amino acids of SEQ ID NO: 4848.

[0030] In some aspects, the spacer comprises an amino acid sequence at least about 70%, at least about 75%, at least about 80%, at least about 85%, at least about 90%, at least about 95%, at least about 96%, at least about 97%, at least about 98%, at least about 99%, or about 100% sequence identity to a sequence selected from the group consisting of SEQ ID NOS: 4523, 4850, 2713, 4524, 4525, and any combination thereof.

[0031] In some aspects, the spacer comprises an amino acid sequence selected from the sequences in TABLE 5 or at least about 70%, at least about 75%, at least about 80%, at least about 85%, at least about 90%, at least about 95%, at least about 96%, at least about 97%, at least about 98%, at least about 99%, or about 100% sequence identity to a sequence in TABLE 5. In some aspects, the spacer further comprises an N-terminal subsequence comprising 1, 2, 3, 4, or 5 IgA2 CH1 C-terminal domain amino acids and/or a C-terminal subsequence comprising 1, 2, 3, 4, or 5 IgA2 CH2 N-terminal domain amino acids. In some aspects, the N-terminal subsequence comprising 1, 2, 3, 4, or 5 IgA2 CH1 C-terminal domain amino acids and/or C-terminal subsequence comprising 1, 2, 3, 4, or 5 IgA2 CH2 N-terminal domain amino acids comprises an amino acid sequence selected from the sequences in TABLE 6.

[0032] The present disclosure also provides a polynucleotide encoding a CAR comprising (i) an antigen-binding domain that binds to an epitope on a tumor antigen expressed on a target cell; (ii) a transmembrane domain; (iii) an intracellular domain; and, (iv) a CAR spacer located between the antigen-binding domain and the transmembrane domain comprising an amino acid sequence derived from a human immunoglobulin hinge and/or constant region or a functional fragment thereof, wherein the spacer comprises an amino acid sequence comprising at least five, six, or seven consecutive amino acids of SEQ ID NO: 2723 or SEQ ID NO: 4843.

[0033] In some aspects, the spacer comprises an amino acid sequence at least about 70%, at least about 75%, at least about 80%, at least about 85%, at least about 90%, at least about 95%, at least about 96%, at least about 97%, at least about 98%, at least about 99%, or about 100% sequence identity to a sequence selected from the group consisting of SEQ ID NOS: 4839, 4840, 4843, and any combination thereof. In some aspects, the spacer comprises an amino acid sequence selected from the sequences in TABLE 7 or at least about 70%, at least about 75%, at least about 80%, at least about 85%, at least about 90%, at least about 95%, at least about 96%, at least about 97%, at least about 98%, at least about 99%, or about 100% sequence identity to a sequence in TABLE 7. In some aspects, the spacer further comprises an N-terminal subsequence comprising 1, 2, 3, 4, or 5 IgG1 CH1 C-terminal domain amino acids and/or a C-terminal subsequence comprising 1, 2, 3, 4, or 5 IgG1 CH2 N-terminal domain amino acids. In some aspects, the N-terminal subsequence comprising 1, 2, 3, 4, or 5 IgG1 CH1 C-terminal domain amino acids and/or C-terminal subsequence comprising 1, 2, 3, 4, or 5 IgG1 CH2 N-terminal domain amino acids comprises an amino acid sequence selected from the sequences in TABLE 8.

[0034] The present disclosure also provides a polynucleotide encoding a CAR comprising (i) an antigen-binding domain that binds to an epitope on a tumor antigen expressed on a target cell; (ii) a transmembrane domain; (iii) an intracellular domain; and, (iv) a CAR spacer located between the antigen-binding domain and the transmembrane domain comprising an amino acid sequence derived from a human immunoglobulin hinge and/or constant region or a functional fragment thereof, wherein the spacer comprises an amino acid sequence comprising at least five, six, or seven consecutive amino acids of SEQ ID NO: 2768 or SEQ ID NO: 4842.

[0035] In some aspects, the spacer comprises an amino acid sequence at least about 70%, at least about 75%, at least about 80%, at least about 85%, at least about 90%, at least about 95%, at least about 96%, at least about 97%, at least about 98%, at least about 99%, or about 100% sequence identity to SEQ ID NO: 4842. In some aspects, the spacer comprises an amino acid sequence selected from the sequences in TABLE 9A or at least about 70%, at least about 75%, at least about 80%, at least about 85%, at least about 90%, at least about 95%, at least about 96%, at least about 97%, at least about 98%, at least about 99%, or about 100% sequence identity to a sequence in TABLE 9A. In some aspects, the spacer further comprises an N-terminal subsequence comprising 1, 2, 3, 4, or 5 IgG2 CH1 C-terminal domain amino acids and/or a C-terminal subsequence comprising 1, 2, 3, 4, or 5 IgG2 CH2 N-terminal domain amino acids. In some aspects, the N-terminal subsequence comprising 1, 2, 3, 4, or 5 IgG2 CH1 C-terminal domain amino acids and/or C-terminal subsequence comprising 1, 2, 3, 4, or 5 IgG2 CH2 N-terminal domain amino acids comprises an amino acid sequence selected from the sequences in TABLE 10A.

[0036] In some aspects, the present disclosure provides a polynucleotide encoding a CAR comprising (i) an antigen-binding domain that binds to an epitope on a tumor antigen expressed on a target cell; (ii) a transmembrane domain; (iii) an intracellular domain; and, (iv) a CAR spacer located between the antigen-binding domain and the transmembrane domain comprising an amino acid sequence derived from a human immunoglobulin hinge and/or constant region or a functional fragment thereof, wherein the spacer comprises an amino acid sequence comprising at least five, six, or seven consecutive amino acids of SEQ ID NO: 4926.

[0037] In some aspects, the spacer comprises an amino acid sequence at least about 70%, at least about 75%, at least about 80%, at least about 85%, at least about 90%, at least about 95%, at least about 96%, at least about 97%, at least about 98%, at least about 99%, or about 100% sequence identity to a sequence selected from the group consisting of SEQ ID NOS: 4830, 4831, 4832, and any combination thereof.

[0038] In some aspects, the spacer comprises an amino acid sequence selected from the sequences in TABLE 9B or at least about 70%, at least about 75%, at least about 80%, at least about 85%, at least about 90%, at least about 95%, at least about 96%, at least about 97%, at least about 98%, at least about 99%, or about 100% sequence identity to a sequence in TABLE 9B. In some aspects, the spacer further comprises an N-terminal subsequence comprising 1, 2, 3, 4, or 5 IgG2 CH1 C-terminal domain amino acids and/or a C-terminal subsequence comprising 1, 2, 3, 4, or 5 IgG2 CH2 N-terminal domain amino acids. In some aspects, the N-terminal subsequence comprising 1, 2, 3, 4, or 5 IgG2 CH1 C-terminal domain amino acids and/or C-terminal subsequence comprising 1, 2, 3, 4, or 5 IgG2 CH2 N-terminal domain amino acids comprises an amino acid sequence selected from the sequences in TABLE 10B.

[0039] The present disclosure also provides a polynucleotide encoding a CAR comprising (i) an antigen-binding domain that binds to an epitope on a tumor antigen expressed on a target cell; (ii) a transmembrane domain; (iii) an intracellular domain; and, (iv) a CAR spacer located between the antigen-binding domain and the transmembrane domain comprising an amino acid sequence derived from a human immunoglobulin hinge and/or constant region or a functional fragment thereof, wherein the spacer comprises an amino acid sequence comprising at least five, six, or seven consecutive amino acids of SEQ ID NO: 4374.

[0040] In some aspects, the spacer comprises an amino acid sequence at least about 70%, at least about 75%, at least about 80%, at least about 85%, at least about 90%, at least about 95%, at least about 96%, at least about 97%, at least about 98%, at least about 99%, or about 100% sequence identity to SEQ ID NO: 4856. In some aspects, the spacer comprises an amino acid sequence selected from the sequences in TABLE 15 or at least about 70%, at least about 75%, at least about 80%, at least about 85%, at least about 90%, at least about 95%, at least about 96%, at least about 97%, at least about 98%, at least about 99%, or about 100% sequence identity to a sequence in TABLE 15. In some aspects, the spacer further comprises an N-terminal subsequence comprising 1, 2, 3, 4, or 5 IgE CH1 C-terminal domain amino acids and/or a C-terminal subsequence comprising 1, 2, 3, 4, or 5 IgE CH2 N-terminal domain amino acids. In some aspects, the N-terminal subsequence comprising 1, 2, 3, 4, or 5 IgE CH1 C-terminal domain amino acids and/or C-terminal subsequence comprising 1, 2, 3, 4, or 5 IgE CH2 N-terminal domain amino acids comprises an amino acid sequence selected from the sequences in TABLE 16.

[0041] The present disclosure also provides a polynucleotide encoding a CAR comprising (i) an antigen-binding domain that binds to an epitope on a tumor antigen expressed on a target cell; (ii) a transmembrane domain; (iii) an intracellular domain; and, (iv) a CAR spacer located between the antigen-binding domain and the transmembrane domain comprising an amino acid sequence derived from a human immunoglobulin hinge and/or constant region or a functional fragment thereof, wherein the spacer comprises an amino acid sequence comprising at least five, six, or seven consecutive amino acids of SEQ ID NO: 4857.

[0042] In some aspects, the spacer comprises an amino acid sequence at least about 70%, at least about 75%, at least about 80%, at least about 85%, at least about 90%, at least about 95%, at least about 96%, at least about 97%, at least about 98%, at least about 99%, or about 100% sequence identity to amino acid sequence of SEQ ID NOS 4858, 4959, 4857, and any combination thereof.

[0043] In some aspects, the spacer comprises an amino acid sequence selected from the sequences in TABLE 17 or at least about 70%, at least about 75%, at least about 80%, at least about 85%, at least about 90%, at least about 95%, at least about 96%, at least about 97%, at least about 98%, at least about 99%, or about 100% sequence identity to a sequence in TABLE 17. In some aspects, the spacer further comprises an N-terminal subsequence comprising 1, 2, 3, 4, or 5 IgM CH1 C-terminal domain amino acids and/or a C-terminal subsequence comprising 1, 2, 3, 4, or 5 IgM CH2 N-terminal domain amino acids. In some aspects, the N-terminal subsequence comprising 1, 2, 3, 4, or 5 IgM CH1 C-terminal domain amino acids and/or C-terminal subsequence comprising 1, 2, 3, 4, or 5 IgM CH2 N-terminal domain amino acids comprises an amino acid sequence selected from the sequences in TABLE 18. In some aspects, the CAR spacer comprises an optional L1 linker and/or an optional L2 linker. In some aspects, an optional L1 linker and/or an optional L2 linker is a flexible linker. In some aspects, the optional L1 linker and/or an optional L2 linker is between 1 and 100 amino acids in length. In some aspects, the L1 linker is between 1 and 10 amino acids in length. In some aspects, the L1 linker comprises a Gly-Ser linker. In some aspects, the L1 linker comprises the sequence set forth in SEQ ID NO: 4818. In some aspects, the L2 linker is between 1 and 10 amino acids in length. In some aspects, the L2 comprises the sequence PGG. In some aspects, the human immunoglobulin hinge region is from IgA1, IgA2, IgD, IgE, IgG1, IgG2, IgG3, or IgM. In some aspects, the functional fragment of a human immunoglobulin hinge and/or constant region comprises (a) an internal subsequence of a hinge and/or constant region; (b) a C-terminal subsequence of a hinge and/or constant region; (c) an N-terminal subsequence of a hinge and/or constant region; (d) a hinge region extended 1 to 10 amino acids towards the N-terminal CH1 domain and/or C-terminal CH2 domain; (e) a subsequence of a hinge region extended 1 to 10 amino acids towards the N-terminal CH1 domain; (f) a subsequence of a hinge region extended 1 to 10 amino acids towards the C-terminal CH2 domain; (g) a sequence comprising 2 or more repeats of (a)-(f); (h) a combination of (a)-(g) corresponding to the same hinge and/or constant region; (i) a combination of (a)-(g) corresponding to different hinges and/or constant regions; or, (j) any combination thereof. In some aspects, the distance between the epitope and the surface of the target cell membrane is estimated using x-ray crystallography, NMR, or cryo-EM structure. In some aspects, the distance between the epitope and the surface of the target cell membrane is estimated using Fluorescence Resonance Energy Transfer (FRET). In some aspects, the CAR induces an increased IFNγ and/or IL-2 expression compared to a corresponding CAR comprising a reference spacer. In some aspects, the CAR induces an increased IFNγ expression by at least about 1.5 fold, at least about 2 fold, at least about 3 fold, at least about 4 fold, at least about 5 fold, at least about 6 fold, at least about 7 fold, at least about 8 fold, at least about 9 fold, at least about 10 fold, at least about 11 fold, at least about 12 fold, at least about 13 fold, at least about 14 fold, at least about 15 fold, at least about 20 fold, compared to a corresponding CAR comprising a reference spacer. In some aspects, the CAR induces an increased IL-2 expression by at least about 1.5 fold, at least about 2 fold, at least about 3 fold, at least about 4 fold, at least about 5 fold, at least about 6 fold, at least about 7 fold, at least about 8 fold, at least about 9 fold, at least about 10 fold, at least about 11 fold, at least about 12 fold, at least about 13 fold, at least about 14 fold, at least about 15 fold, at least about 20 fold, compared to a corresponding CAR comprising a reference spacer. In some aspects, the antigen-binding domain comprises an antibody or an antigen-binding fragment thereof that specifically binds to an epitope on a tumor antigen. In some aspects, the tumor antigen comprises ROR1, HER2, AFP, TRAC, TCRβ, BCMA, CLL-1, CS1, CD38, CD19, TSHR, CD123, CD22, CD30, CD70, CD171, CD33, EGFRvIII, GD2, GD3, Tn Ag, PSMA, ROR2, GPC1, GPC2, FLT3, FAP, TAG72, CD44v6, CEA, EPCAM, B7H3, KIT, IL-13Ra2, mesothelin, IL-11Ra, PSCA, PRSS21, VEGFR2, LewisY, CD24, PDGFR-beta, SSEA-4, CD20, folate receptor alpha, ERBB2 (Her2/neu), MUC1, MUC16, EGFR, NCAM, prostase, PAP, ELF2M, Ephrin B2, IGF-I receptor, CAIX, LMP2, gplOO, bcr-abl, tyrosinase, EphA2, Fucosyl GM1, sLe, GM3, TGS5, HMWMAA, o-acetyl-GD2, Folate receptor beta, TEM1/CD248, TEM7R, CLDN6, GPRC5D, CXORF61, CD97, CD179a, ALK, Polysialic acid, PLAC1, GloboH, NY-BR-1, UPK2, HAVCR1, ADRB3, PANX3, GPR20, LY6K, OR51E2, TARP, WTI, NY-ESO-1, LAGE-la, MAGE-A1, legumain, HPV E6, E7, MAGE Al, ETV6-AML, sperm protein 17, XAGE1, Tie 2, MAD-CT-1, MAD-CT-2, Fos-related antigen 1, p53, p53 mutant, prostein, survivin and telomerase, PCTA-1/Galectin 8, MelanA/MART1, Ras mutant, hTERT, sarcoma translocation breakpoints, ML-IAP, ERG (TMPRSS2 ETS fusion gene), NA17, PAX3, Androgen receptor, Cyclin B1, MYCN, RhoC, TRP-2, CYP1B1, BORIS, SART3, PAX5, OY-TES1, LCK, AKAP-4, SSX₂, RAGE-1, human telomerase reverse transcriptase, RU1, RU2, intestinal carboxyl esterase, mut hsp70-2, CD79a, CD79b, CD72, LAIR1, FCAR, LILRA2, CD300LF, CLEC12A, BST2, EMR2, LY75, GPC3, FCRL5, IGLL1, CD2, CD3ε, CD4, CD5, CD7, the extracellular portion of the APRIL protein, and any combinations thereof.

[0044] In some aspects, the tumor antigen comprises ROR1, CD19 or Her2. In some aspects, the antigen-binding domain comprises an anti-ROR1 antibody or an antigen-binding fragment thereof. In some aspects, the antigen-binding domain cross-competes with the R11 antibody, R12 antibody, or 2A2 antibody. In some aspects, the antigen-binding domain binds to the same epitope as the R11 antibody, R12 antibody, or 2A2 antibody. In some aspects, the antigen-binding domain comprises heavy chain variable region (VH) CDR3 of the R11 antibody, R12 antibody, or 2A2 antibody. In some aspects, the antigen-binding domain further comprises VH CDR1 and VH CDR2. In some aspects, the VH CDR1 comprises the VH CDR1 of the R11 antibody, R12 antibody, or 2A2 antibody and/or the VH CDR2 comprises the VH CDR2 of the R11 antibody, R12 antibody, or 2A2 antibody. In some aspects, the antigen-binding domain further comprises light chain variable region (VL) CDR1, VL CDR2, and/or VL CDR3. In some aspects, the VL CDR1 comprises the VL CDR1 of the R11 antibody, R12 antibody, or 2A2 antibody, the VL CDR2 comprises the VL CDR2 of the R11 antibody, R12 antibody, or 2A2 antibody, and/or the VL CDR3 comprises the VL CDR3 of the R11 antibody, R12 antibody, or 2A2 antibody. In some aspects, the antigen-binding domain comprises: (i) VH CDR1 of SEQ ID NO: 4888; VH CDR2 of SEQ ID NO: 4889; and VH CDR3 of SEQ ID NO: 4890; and/or VL CDR1 of SEQ ID NO: 4892; VL CDR2 of SEQ ID NO: 4893; and VL CDR3 of SEQ ID NO: 4894; (ii) VH CDR1 of SEQ ID NO: 4896; VH CDR2 of SEQ ID NO: 4897; and VH CDR23 of SEQ ID NO: 4898; and/or VL CDR1 of SEQ ID NO: 4900; VL CDR2 of SEQ ID NO: 4901; and VL CDR3 of SEQ ID NO: 4902; or (iii) VH CDR1 of SEQ ID NO: 4904; VH CDR2 of SEQ ID NO: 4905; and VH CDR23 of SEQ ID NO: 4906; and/or VL CDR1 of SEQ ID NO: 4908; VL CDR2 of SEQ ID NO: 4909; and VL CDR3 of SEQ ID NO: 4910.

[0045] In some aspects, the antigen-binding domain comprises a heavy chain variable region (VH) and a light chain variable region (VL), and wherein: (i) the VH comprises SEQ ID NO: 4887; or the VL comprises SEQ ID NO: 4891; (ii) the VH comprises SEQ ID NO: 4895; or the VL comprises SEQ ID NO: 4899; or (iii) the VH comprises SEQ ID NO: 4903; or the VL comprises SEQ ID NO: 4907. In some aspects, the antigen-binding domain comprises a VH comprising SEQ ID NO: 4895 and a VL comprising SEQ ID NO: 4899; and wherein the spacer consists of SEQ ID NO: 4830. In some aspects, the CAR is designed as a standard CAR, a split CAR, an off-switch CAR, an on-switch CAR, a first-generation CAR, a second-generation CAR, a third-generation CAR, or a fourth-generation CAR. In some aspects, the antigen-binding domain is an lg NAR, a Fab, a Fab′, a F(ab)′2, a F(ab)′3, an Fv, a single chain variable fragment (scFv), a bis-scFv, a (scFv)₂, a minibody, a diabody, a triabody, a tetrabody, an intrabody, a disulfide stabilized Fv protein (dsFv), a unibody, a nanobody, an affibody, a DARPin, a monobody, an adnectin, an alphabody, or a designed binder. In some aspects, the intracellular domain of the CAR is a signaling domain derived from CD3zeta, FcR gamma, FcR beta, CD3 gamma, CD3 delta, CD3 epsilon, CDS, CD22, CD79a, CD79b, and CD66d. In some aspects, the CAR further comprises a co-stimulatory domain derived from 2B4, HVEM, ICOS, LAG3, DAP10, DAP12, CD27, CD28, 4-1BB (CD137), OX40 (CD134), CD30, CD40, ICOS (CD278), glucocorticoid-induced tumor necrosis factor receptor (GITR), lymphocyte function-associated antigen-1 (LFA-1), CD2, CD7, LIGHT, NKG2C, or B7-H3.

[0046] In some aspects, the polynucleotide is a DNA molecule, or a RNA molecule. In some aspects, the transmembrane domain is linked to the intracellular domain by a linker. In some aspects, the CAR is a bispecific CAR. In some aspects, the CAR is an inducible CAR.

[0047] The present disclosure also provides a vector comprising a polynucleotide disclosed herein operably linked to a regulatory element. In some aspects, the vector is a viral vector, a mammalian vector, or bacterial vector. In some aspects, the vector is a retroviral vector. In some aspects, the vector is selected from the group consisting of an adenoviral vector, a lentivirus, a Sendai virus vector, a baculoviral vector, an Epstein Barr viral vector, a papovaviral vector, a vaccinia viral vector, a herpes simplex viral vector, a hybrid vector, and an adeno associated virus (AAV) vector. In some aspects, the vector is a lentivirus.

[0048] The present disclosure also provides a composition comprising a polynucleotide disclosed herein or a vector disclosed herein. Also provided is a kit comprising a polynucleotide, a vector, or a composition disclosed herein. Also provided is a CAR encoded by one or more polynucleotide sequences or vector disclosed herein. Also provided is a cell genetically modified to express a CAR, comprising a polynucleotide or a vector disclosed herein. In some aspects, the cell is a T cell, a natural killer (NK) cell, a natural killer T (NKT) cell, an ILC cell, a macrophage, or an antigen presenting cell.

[0049] The present disclosure provides a composition comprising a CAR disclosed herein or a cell disclosed herein. The present disclosure also provides a composition disclosed herein for treating a subject in need of a CAR therapy. Also provided is a pharmaceutical composition comprising a cell or a composition disclosed herein for treating cancer in a subject in need thereof. Also provided is a kit comprising a CAR, a cell, a composition or a pharmaceutical composition disclosed herein.

[0050] The present disclosure also provides the use of a polynucleotide, a vector, a composition, a kit, a CAR, a cell, a pharmaceutical composition, or a kit disclosed herein for the manufacture of a medicament for treating cancer in a subject in need thereof. Also provided is a method of stimulating a T cell-mediated immune response to a target cell population or tissue in a subject, comprising administering an effective amount of a cell disclosed herein to the subject. Also provided is a method of providing an anti-tumor immunity in a subject in need thereof, the method comprising administering to the subject an effective amount of a cell disclosed herein. Also provided is a method of treating cancer in a subject in need thereof comprising administering to the subject an effective amount of a cell disclosed herein. Also provided is a method of preparing a population of cells for a therapy comprising transducing a population of cells isolated from a subject with a polynucleotide or a vector disclosed herein. In some aspects, the transduction comprises culturing the cell under suitable condition.

[0051] The present disclosure also provides a method of generating a persisting population of genetically engineered cells in a subject diagnosed with cancer, the method comprising administering to the subject a cell genetically engineered to express a CAR disclosed herein. Also provided is a method of expanding a population of genetically engineered cells in a subject diagnosed with cancer, the method comprising administering to the subject a cell genetically engineered to express a CAR disclosed herein. In some aspects, the cell is a T cell. In some aspects, the cell is an autologous T cell. In some aspects, the subject is a human subject.

[0052] The present disclosure also provides a method to improve one or more properties of a CAR therapy comprising inserting a CAR spacer between an antigen-binding domain and a transmembrane domain of a CAR, wherein the CAR spacer is the spacer recited in a polynucleotide disclosed herein. Also provided is a method to improve one or more properties of a CAR therapy comprising inserting a CAR spacer between an antigen-binding domain and a transmembrane domain of a CAR, wherein the CAR spacer is the spacer recited in a polynucleotide disclosed herein, wherein the spacer is located between the ligand-binding domain and the transmembrane domain. In some aspects, the CAR spacer is the spacer recited in a polynucleotide disclosed herein. In some aspects, the one or more improved properties of the CAR therapy is increased secretion of one or more cytokines. In some aspects, the cytokine secretion induced by the CAR is increased with respect to the secretion observed after administration of a corresponding CAR comprising a reference spacer. In some aspects, the cytokine is an interleukin. In some aspects, the interleukin is interleukin-2. In some aspects, the cytokine is an interferon. In some aspects, the interferon is interferon-gamma.

[0053] The present disclosure also provides a method to design a CAR spacer comprising measuring the distance between the target epitope and the target cell surface, wherein the sequence of the spacer is an Ig hinge sequence, a subsequence thereof, or a combination thereof.

### BRIEF DESCRIPTION OF THE DRAWINGS/FIGURES

[0054] FIG. 1. Schematic representation of a CAR showing its domain organization. The present disclosure relates to the engineering of the extracellular spacer component of CARs. The binding domain can be, e.g., a single chain variable fragment (scFv) in the V_{H}-V_{L} or V_{L}-V_{H} orientation, or any antigen-binding portion of an antibody or combination thereof. The ectodomain comprises an antigen-binding domain and a CAR spacer. The endodomain can also be referred to as an intracellular or intracytoplasmic domain and comprises an ITAM and optional costimulatory modules.

[0055] FIG. 2. Schematic representation showing the differences in structure between different generations of CARs. First generation CARs comprise an antigen-binding domain (e.g., an scFv) connected to ITAM directly via a transmembrane region. Second generation CARs comprise a costimulatory molecule (CM1) interposed between ITAM and the transmembrane domain. Third generation CARs include an additional costimulatory molecule (CM2). In fourth generation CARs a costimulatory molecule has been replaced with an IL-12 inducer. Fifth generation CARs are based on second generation CARs, but they contain a truncated cytoplasmic IL-2 receptor β-chain domain.

[0056] FIG. 3. Schematic representation of the architecture of human immunoglobulins.

[0057] FIG. 4. Schematic representation showing the domain structures of IgA1 and IgA2.

[0058] FIG. 5. Schematic representation of IgG1, IgG2, IgG3 and IgG4.

[0059] FIG. 6. Sequence repeats (a or b) present (+) or absent (−) in different IgG3 allotypes. The only naturally occurring sequences are ab, abb, and abbb.

[0060] FIG. 7. Schematic representation of the relationship between spacer length, distance between the target epitope and target cell membrane surface, and the width of the signaling synapse.

[0061] FIG. 8. Schematic representation of the modular structure of the IgG3 hinge, and a library of modular spacers with varying lengths and compositions derived from the IgG3 hinge.

[0062] FIG. 9. List of immunoglobulin-derived spacers used in the examples (Spacers 1-11 and Spacers 13-31). Each spacer can comprise an optional Gly-Ser flexible linker sequence (an exemplary GLy-Ser linker sequence of SEQ ID NO: 4818 is shown; in some aspects the linker can be SEQ ID NO:5088). The tables show the length of each spacer in amino acids and theoretical extended conformation length in angstrom (only spacer, or spacer plus linker).The tables also indicate whether cysteines are present.

[0063] FIG. 10. Bar graph quantitating the levels of IFN-γ secretion after 24 hours by T cells expressing ROR1 CAR with the indicated spacers and Mock (untransduced) T cells in the absence of the target antigen. R12 CART cells were transduced with R12CAR-P2A-EGFRt. R12CAR: a CAR directed against human ROR1. P2A: a self-cleaving peptide. EGFRt: a truncated human EGFR containing EGFR extracellular Domains III and IV and an EGFR transmembrane domain while lacking EGFR Domains I and II and EGFR intracellular sequence. “Short” reference spacer means an IgG4 spacer of SEQ ID NO: 4911.

[0064] FIG. 11A. Graph summarizing the effects of the indicated spacers on IL-2 and IFN-γ secretion by R12 CART cells during a 24 hr co-culture with H1975 cells expressing human ROR1. R12 CART cells were transduced with R12CAR-P2A-EGFRt.

[0065] FIG. 11B. Graphs summarizing the effects of the indicated spacer lengths on IL-2 and IFN-γ secretion by R12 CART cells during a 24 hr co-culture with H1975 cells expressing human ROR1. R12 CART cells were transduced with R12CAR-P2A-EGFRt.

[0066] FIG. 11C. Graphs summarizing the correlation between target lytic capabilities and cytokine release profiles of T cells expressing R12 CAR with indicated spacers during a co-culture with H1975 cells expressing human ROR1. Target lytic capabilities were measured by integrating the area under the normalized target cell killing curves (i.e., area under the curve, or AUC). R12 CART cells were transduced with R12 CAR-P2A-EGFRt.

[0067] FIGS. 12A, 12B, 12C and 12D. Graphs summarizing effects of the indicated spacers, separated by antibody families from which the spacers originated, on long-term cytotoxic activity of R12 CART cells following repeated exposure to Jeko1 cells that express human ROR1. Mock (untransduced) T cell activity is included in each plot for comparison. The numbers of remaining Jeko1 cells during 3 rounds of co-culture with R12 CART cells were normalized to the first time point of each round (i.e., 0 hr, 68 hr, and 148 hr). R12 CART cells were transduced with R12CAR-P2A-EGFRt.

[0068] FIG. 12E. Lengths of the top five spacers (Spacers 1, 11, 13, 14, and Short) selected based on the long-term cytotoxic activity measured in FIGS. 12A, 12B, 12C and 12D.

[0069] FIGS. 13A and 13B. Percentage of transduced cells measured by surface expression of transduction marker EGFRt on primary T cells in donors D3868 (FIG. 13A) and D4869 (FIG. 13B).

[0070] FIGS. 13C and 13D. Median fluorescence intensity (MFI) for bound anti-FMC63 protein on live, transduced cells (EGFRt+ cells) in donor D3868 (FIG. 13C) and donor D4869 (FIG. 13D). Triangles indicate decreasing spacer length within a given immunoglobulin type.

[0071] FIGS. 14A-14E. Effects of indicated spacers on FMC63 CAR-T induced cytotoxicity in the presence of NucLight Red-labeled Raji (Raji-NLR) target cells expressing human CD19 target antigen in donor D3868. FIG. 14A shows the IncuCyte kinetic killing curves for each CAR variant with the indicated spacer. FIG. 14B shows the AUC calculated for each killing curve from FIG. 14A. FIGS. 14C-14E are bar graphs showing concentrations of IFN-γ (FIG. 14C), IL-2 (FIG. 14D) and TNFα (FIG. 14E) in co-culture media 24 hours post co-culturing. “Short” reference spacer is an IgG4 hinge-derived spacer of SEQ ID NO: 4911. “Intermediate” reference spacer is an IgG4 hinge-derived spacer of SEQ ID NO:4912. “Long” reference spacer is an IgG4 hinge-derived spacer of SEQ ID NO: 4913. All IncuCyte kinetic killing curves represent NucLight Red signal over time. Non-transduced primary T cell are indicated as “NTC” in this and all drawings.

[0072] FIGS. 15A-15E. Effects of indicated spacers on FMC63 CAR-T induced cytotoxicity in the presence of Raji-NLR target cells expressing human CD19 target antigen in donor D4869. FIG. 15A shows the IncuCyte kinetic killing curves for each CAR variant with the indicated spacer. FIG. 15B shows the AUC calculated for each killing curve from FIG. 14A. FIGS. 15C-15E are bar graphs showing concentrations of IFN-γ (FIG. 15C), IL-2 (FIG. 15D) and TNFα (FIG. 15E) in co-culture media 24 hours post co-culturing.

[0073] FIGS. 16A-16E. Effects of indicated spacers on FMC63 CAR-T induced cytotoxicity in the presence of NucLight Red-labeled Nalm6 (Nalm6-NLR) target cells expressing human CD19 target antigen in donor D3868. FIG. 16A shows the IncuCyte kinetic killing curves for each CAR variant with the indicated spacer. FIG. 16B shows the AUC calculated for each killing curve from FIG. 14A. FIGS. 16C-16E are bar graphs showing concentrations of IFN-γ (FIG. 16C), IL-2 (FIG. 16D) and TNFα (FIG. 16E) in co-culture media 24 hours post co-culturing.

[0074] FIGS. 17A-17E. Effects of indicated spacers on FMC63 CAR-T induced cytotoxicity in the presence of Nalm6-NLR target cell expressing human CD19 target antigen in donor D4869. FIG. 17A shows the IncuCyte kinetic killing curves for each CAR variant with the indicated spacer. FIG. 17B shows the AUC calculated for each killing curve from FIG. 14A. FIGS. 17C-17E are bar graphs showing concentrations of IFN-γ (FIG. 17C), IL-2 (FIG. 17D) and TNFα (FIG. 17E) in co-culture media 24 hours post co-culturing.

[0075] FIGS. 18A-18E. Effects of indicated spacers on FMC63 CAR-T induced cytotoxicity in the presence of NucLight Red-labeled Raji target cells with CD19 knocked out (Raji_CD19_KO-NLR) in donor D3868. FIG. 18A shows the IncuCyte kinetic killing curves for each CAR variant with the indicated spacer. FIG. 18B shows the AUC calculated for each killing curve from FIG. 14A. FIG. 18C-18E are bar graphs showing concentrations of IFN-γ (FIG. 18C), IL-2 (FIG. 18D) and TNFα (FIG. 18E) in co-culture media 24 hours post co-culturing.

[0076] FIGS. 19A-19E. Effects of indicated spacers on FMC63 CAR-T induced cytotoxicity in the presence of NucLight Red-labeled Raji target cells with CD19 knocked out (Raji_CD19_KO-NLR) in donor D4869. FIG. 19A shows the IncuCyte kinetic killing curves for each CAR variant with the indicated spacer. FIG. 19B shows the AUC calculated for each killing curve from FIG. 14A. FIG. 19C-19E are bar graphs showing concentrations of IFN-γ (FIG. 19C), IL-2 (FIG. 19D) and TNFα (FIG. 19E) in co-culture media 24 hours post co-culturing.

[0077] FIGS. 20A-20C. Bar graphs showing cytokine secretion profile on FMC63 CAR-T cells derived from donor D3868 expressing indicated spacers in the absence of target cells. The CAR-Ts with spacers exhibiting elevated cytokine production in the absence of target cells are considered to exhibit tonic signaling.

[0078] FIGS. 21A-21C. Bar graphs showing cytokine secretion profile on FMC63 CAR-T cells derived from donor D4869 expressing indicated spacers in the absence of target cells. The CAR-Ts with spacers exhibiting elevated cytokine production in the absence of target cells are considered to exhibit tonic signaling.

[0079] FIGS. 22A-22B. Scatter plots summarizing target-dependent cytokine secretion versus killing AUC for the FMC63 CAR-T (spacers indicated by labels) cells when co-cultured with Raji-NLR cells. FIG. 22A is donor D3868. FIG. 22B is donor D4869. The best-performing spacers are at the top left of the plot (high IFN-γ, high IL-2, and low AUC).

[0080] FIGS. 23A-23D. Scatter plots summarizing the effects of indicated spacer lengths on IL-2 and IFNγ secretion by FMC63 CAR-T cells after a 24-hour co-culture with human CD19 expressing target cells. The shaded boxes indicate the approximate window of spacer lengths that lead to maximal cytokine production. FIG. 23A shows FMC63 CAR-T derived from donor D3868 that was co-cultured with Raji cells. FIG. 23B shows FMC63 CAR-T derived from donor D3868 that was co-cultured with Nalm6 cells. FIG. 23C shows FMC63 CAR-T derived from donor D4869 that was co-cultured with Raji cells. FIG. 23D shows FMC63 CAR-T derived from donor D4869 was co-cultured with Nalm6 cells.

[0081] FIGS. 24A and 24B. Scatter plots summarizing the effects of indicated spacer lengths on killing AUC when Raji cells expressing human CD19 were co-cultured with FMC63 CAR-T cells, derived from donor D3868 (FIG. 24A) and donor D4869 (FIG. 24B), respectively. Spacer names are indicated by the labels. The circles represent the approximate window of spacer lengths that lead to fastest killing kinetics.

[0082] FIGS. 25A-25D. Graphs summarizing the effects of the indicated spacers on long-term cytotoxic activity of FMC63 CAR-T cells following repeated exposure to target cells that express human CD19 from donor D3868. FIG. 25A shows killing curves of Nalm6-NLR target cells during four rounds of co-culture with FMC63 CAR-T cells expressing CARs comprising indicated spacers. FIG. 25B highlights a subset of FMC63 CAR-T cells with most persistent long-term cytotoxicity during repeated exposure to Nalm6 cells. FIG. 25C shows killing curves of Raji-NLR target cells during four rounds of co-culture with FMC63 CAR-T cells expressing CARs comprising indicated spacers. FIG. 25D highlights a subset of FMC63 CAR-T cells with most persistent long-term cytotoxicity during repeated exposure to Raji cells.

[0083] FIGS. 26A-26D. Graphs summarizing the effects of the indicated spacers on long-term cytotoxic activity of FMC63 CAR-T cells following repeated exposure to target cells that express human CD19 from donor D4869. FIG. 26A shows killing curves of Nalm6-NLR target cells during four rounds of co-culture with FMC63 CAR-T cells expressing CARs comprising indicated spacers. FIG. 26B highlights a subset of FMC63 CAR-T cells with most persistent long-term cytotoxicity during repeated exposure to Nalm6 cells. FIG. 26C shows killing curves of Raji-NLR target cells during four rounds of co-culture with FMC63 CAR-T cells expressing CARs comprising indicated spacers. FIG. 26D highlights a subset of FMC63 CAR-T cells with most persistent long-term cytotoxicity during repeated exposure to Raji cells.

[0084] FIGS. 27A and 27B. Percentage of transduced cells measured by surface expression of transduction marker EGFRt on live primary T cells in donors D13814 (FIG. 27A) and D15842 (FIG. 27B).

[0085] FIGS. 27C and 27D. MFI for bound Protein L on live, transduced cells (EGFRt+ cells) in donor D13814 (FIG. 27C) and donor D15842 (FIG. 27D). Triangles indicate decreasing spacer length within a given immunoglobulin type.

[0086] FIGS. 28A-28E. Effects of indicated spacers on anti-Her2 CAR-T induced cytotoxicity in the presence of NucLight Red-labeled A549 target cells (A549-NLR) expressing human Her2 (human epidermal growth factor receptor 2) target antigen (using T cells from donor D13814). FIG. 28A shows the IncuCyte kinetic killing curves for each CAR variant with the indicated spacer. FIG. 28B shows the AUC calculated for each killing curve from FIG. 28A. FIGS. 28C-28E are bar graphs showing concentrations of IFN-γ (FIG. 28C), IL-2 (FIG. 28D) and TNFα (FIG. 28E) in co-culture media 24 hours post co-culturing.

[0087] FIGS. 29A-29E. Effects of indicated spacers on anti-Her2 CAR-T induced cytotoxicity in the presence of NucLight Red-labeled A549 target cells (A549-NLR) expressing human Her2 (human epidermal growth factor receptor 2) target antigen (using T cells from donor D15842). FIG. 29A shows the IncuCyte kinetic killing curves for each CAR variant with the indicated spacer. FIG. 29B shows the AUC calculated for each killing curve from FIG. 29A. FIGS. 29C-29E are bar graphs showing concentrations of IFN-γ (FIG. 29C), IL-2 (FIG. 29D) and TNFα (FIG. 29E) in co-culture media 24 hours post co-culturing.

[0088] FIGS. 30A-30E. Effects of indicated spacers on anti-Her2 CAR-T induced cytotoxicity in the presence of NucLight Red-labeled T47D target cells (T47D-NLR) expressing human Her2 (human epidermal growth factor receptor 2) target antigen (using T cells from donor D13814). FIG. 30A shows the IncuCyte kinetic killing curves for each CAR variant with the indicated spacer. FIG. 30B shows the AUC calculated for each killing curve from FIG. 30A. FIGS. 30C-30E are bar graphs showing concentrations of IFN-γ (FIG. 30C), IL-2 (FIG. 30D) and TNFα (FIG. 30E) in co-culture media 24 hours post co-culturing.

[0089] FIGS. 31A-31E. Effects of indicated spacers on anti-Her2 CAR-T induced cytotoxicity in the presence of NucLight Red-labeled T47D target cells (T47D-NLR) expressing human Her2 (human epidermal growth factor receptor 2) target antigen (using T cells from donor D15842). FIG. 31A shows the IncuCyte kinetic killing curves for each CAR variant with the indicated spacer. FIG. 31B shows the AUC calculated for each killing curve from FIG. 31A. FIGS. 31C-31E: are bar graphs showing concentrations of IFN-γ (FIG. 31C), IL-2 (FIG. 31D) and TNFα (FIG. 31E) in co-culture media 24 hours post co-culturing.

[0090] FIGS. 32A-32E. Effects of indicated spacers on anti-Her2 CAR-T induced cytotoxicity in the presence of NucLight Red-labeled T47D target cells with Her2 knocked out (T47D_Her2_KO-NLR) (using T cells from donor D13814). FIG. 32A shows the IncuCyte kinetic killing curves for each CAR variant with the indicated spacer. FIG. 32B shows the AUC calculated for each killing curve from FIG. 32A. FIGS. 32C-32E are bar graphs showing concentrations of IFN-γ (FIG. 32C), IL-2 (FIG. 32D) and TNFα (FIG. 32E) in co-culture media 24 hours post co-culturing.

[0091] FIGS. 33A-33E. Effects of indicated spacers on anti-Her2 CAR-T induced cytotoxicity in the presence of NucLight Red-labeled T47D target cells with Her2 knocked out (T47D_Her2_KO-NLR) (using T cells from donor D15842). FIG. 33A shows the IncuCyte kinetic killing curves for each CAR variant with the indicated spacer. FIG. 33B shows the AU) calculated for each killing curve from FIG. 33A. FIGS. 33C-33E are bar graphs showing concentrations of IFN-γ (FIG. 33C), IL-2 (FIG. 33D) and TNFα (FIG. 33E) in co-culture media 24 hours post co-culturing.

[0092] FIGS. 34A-34C. Bar graphs showing cytokine secretion profile (IFNg, FIG. 34A; IL-2, FIG. 34B; TNFa, FIG. 34C) on anti-Her2 (human epidermal growth factor receptor 2) CAR-T cells derived from donor D13814 expressing indicated spacers in the absence of target cells. The CAR-Ts with spacers exhibiting elevated cytokine production in the absence of target cells are considered to exhibit tonic signaling.

[0093] FIGS. 35A-35C. Bar graphs showing cytokine secretion profile (IFNg, FIG. 35A; IL-2, FIG. 35B; TNFα, FIG. 35C) on anti-Her2 CAR-T cells derived from donor D15842 expressing indicated spacers in the absence of target cells. The CAR-Ts with spacers exhibiting elevated cytokine production in the absence of target cells are considered to exhibit tonic signaling.

[0094] FIGS. 36A-36D. Scatter plots summarizing target-dependent cytokine secretion versus killing AUC for the anti-Her2 CAR-T (spacers indicated by labels) cells when co-cultured with human Her2 expressing target cells. FIG. 36A: anti-Her2 CAR-T derived from donor D13814 was co-cultured with A549 cells. FIG. 36B: anti-Her2 CAR-T derived from donor D13814 was co-cultured with T47D cells. FIG. 36C: anti-Her2 CAR-T derived from donor D15842 was co-cultured with A549 cells. FIG. 36D: anti-Her2 CAR-T derived from donor D15842 was co-cultured with T47D cells. The best-performing spacers are at the top left of the plot (high IFN-γ, high IL-2, and low AUC).

[0095] FIGS. 37A-37D. Scatter plots summarizing the effects of indicated spacer lengths on IL-2 and IFNg secretion by anti-Her2 CAR-T cells after a 24-hour co-culture with human Her2 expressing target cells. The shaded boxes indicate the approximate window of spacer lengths that lead to maximal cytokine production. FIG. 37A: anti-Her2 CAR-T derived from donor D13814 was co-cultured with A549 cells. FIG. 37B: anti-Her2 CAR-T derived from donor D13814 was co-cultured with T47D cells. FIG. 37C: anti-Her2 CAR-T derived from donor D15842 was co-cultured with A549 cells. FIG. 37D: anti-Her2 CAR-T derived from donor D15842 was co-cultured with T47D cells.

[0096] FIGS. 38A-38D. Scatter plots summarizing the effects of indicated spacer lengths on killing AUC when target cells expressing human Her2 were co-cultured with anti-Her2 CAR-T cells. FIG. 38A: anti-Her2 CAR-T derived from donor D13814 was co-cultured with A549 cells. FIG. 38B: anti-Her2 CAR-T derived from donor D13814 was co-cultured with T47D cells. FIG. 38C: anti-Her2 CAR-T derived from donor D15842 was co-cultured with A549 cells. FIG. 38D: anti-Her2 CAR-T derived from donor D15842 was co-cultured with T47D cells. Spacer names are indicated by the labels. The circles represent the approximate window of spacer lengths that lead to fastest killing kinetics.

[0097] FIGS. 39A-39D. Graphs summarizing the effects of the indicated spacers on long-term cytotoxic activity of anti-Her2 CAR-T cells from donor D13814 following repeated exposure to target cells that express human Her2. FIG. 39A shows killing curves of A549-NLR target cells during four rounds of co-culture with anti-Her2 CAR-T cells expressing CARs comprising indicated spacers. FIG. 39B highlights a subset of anti-Her2 CAR-T cells with most persistent long-term cytotoxicity during repeated exposure to A549 cells. FIG. 39C shows killing curves of T47D-NLR target cells during four rounds of co-culture with anti-Her2 CAR-T cells expressing CARs comprising indicated spacers. FIG. 39D highlights a subset of anti-Her2 CAR-T cells with most persistent long-term cytotoxicity during repeated exposure to T47D cells.

[0098] FIGS. 40A-40D. Graphs summarizing the effects of the indicated spacers on long-term cytotoxic activity of anti-Her2 CAR-T cells from donor D15842 following repeated exposure to target cells that express human Her2. FIG. 40A shows killing curves of A549-NLR target cells during four rounds of co-culture with anti-Her2 CAR-T cells expressing CARs comprising indicated spacers. FIG. 40B highlights a subset of anti-Her2 CAR-T cells with most persistent long-term cytotoxicity during repeated exposure to A549 cells. FIG. 40C shows killing curves of T47D-NLR target cells during four rounds of co-culture with anti-Her2 CAR-T cells expressing CARs comprising indicated spacers. FIG. 40D highlights a subset of anti-Her2 CAR-T cells with most persistent long-term cytotoxicity during repeated exposure to T47D cells.

[0099] FIG. 41. Three-dimensional structure of the Ig fold (A), and the topology of the structural elements in the fold (B). The location of the β-strand secondary structure elements and the location of the loop regions connecting the β-strands is shown. As disclosed below, each loop region or fragment thereof (optionally comprising one or more amino acids from an adjacent β-strand) from an immunoglobulin constant domain (e.g., a CH1, CH2, CH3, or CL constant domain) from a human or murine immunoglobulin can be used as a CAR spacer of the present disclosure.

[0100] FIG. 42. Multiple sequence alignment of immunoglobulin heavy chains showing the secondary structure (Conformation) overlaid onto the sequence alignment. As disclosed in the specification, subsequences having a coil secondary structure or enriched in amino acid residues having a coil secondary structure can be used as CAR spacers of the present disclosure. Regions having high concentrations, of proline, cysteine, and glycine, are highlighted.

[0101] FIG. 43. Multiple sequence alignment of immunoglobulin light chains showing the secondary structure (Conformation) overlaid onto the sequence alignment. As disclosed in the specification, subsequences having a coil secondary structure or enriched in amino acid residues having a coil secondary structure can be used as CAR spacers of the present disclosure.

[0102] FIGS. 44A and 44B. Percentage of transduced cells measured by surface expression of transduction marker EGFRt on live primary T cells in donor D7811 (FIG. 44A) and donor D5018 (FIG. 44B). FIGS. 44C and 44D show the MFI for bound hROR1-Fc on live, transduced cells (EGFRt+ cells) in donor D7811 (FIG. 44C) and donor D5018 (FIG. 44D).

[0103] FIGS. 45A-45C. Effects of indicated spacers on R11-CAR-induced cytotoxicity in the presence of NucLight Red-labeled A549 target cells (A549-NLR) expressing human ROR1 target antigen in donor D7811. FIG. 45A shows the AUC calculated for IncuCyte kinetic killing curves for each CAR variant with the indicated spacer. Spacers for which no in vitro functional data was generated are indicated as “nd” (not determined) in this figure and figures below. FIG. 45B-C are bar graphs showing concentrations of IFN-g (B) and IL-2 (C) in co-culture media 24 hours post co-culturing. Open bars indicate measurements outside of assay linear dynamic range, therefore should not be interpreted quantitatively.

[0104] FIGS. 46A-46C. Effects of indicated spacers on R11-CAR-induced cytotoxicity in the presence of NucLight Red-labeled A549 target cells (A549-NLR) expressing human ROR1 target antigen in donor D5018. FIG. 46A shows the AUC calculated for IncuCyte kinetic killing curves for each CAR variant with the indicated spacer. FIG. 46B-C are bar graphs showing concentrations of IFN-g (B) and IL-2 (C) in co-culture media 24 hours post co-culturing. Open bars indicate measurements outside of assay linear dynamic range, therefore should not be interpreted quantitatively.

[0105] FIGS. 47A-47C. Effects of indicated spacers on R11-CAR-induced cytotoxicity in the presence of NucLight Red-labeled H1975 target cells (H1975-NLR) expressing human ROR1 target antigen in donor D7811. FIG. 47A shows the AUC calculated for IncuCyte kinetic killing curves for each CAR variant with the indicated spacer. FIG. 47B-C are bar graphs showing concentrations of IFN-g (B) and IL-2 (C) in co-culture media 24 hours post co-culturing. Open bars indicate measurements outside of assay linear dynamic range, therefore should not be interpreted quantitatively.

[0106] FIGS. 48A-48B. Effects of indicated spacers on R11-CAR-induced cytotoxicity in the presence of NucLight Red-labeled H1975 target cells (H1975-NLR) expressing human ROR1 target antigen in donor D5018. FIG. 48A shows the AUC calculated for IncuCyte kinetic killing curves for each CAR variant with the indicated spacer. FIG. 48B is a bar graph showing concentrations of IFN-g in co-culture media 24 hours post co-culturing.

[0107] FIGS. 49A-49B. Effects of indicated spacers on R11-CAR-induced cytotoxicity in the presence of NucLight Red-labeled A549 target cells with ROR1 knocked out (A540_ROR1_KO-NLR) in donor D7811. FIG. 49A shows the AUC calculated for IncuCyte kinetic killing curves for each CAR variant with the indicated spacer. FIG. 49B is a bar graph showing concentrations of IFN-g in co-culture media 24 hours post co-culturing. A small population of ROR1+ cells is present in A549_ROR1_KO-NLR cell line, which accounts for the apparent killing (A) and cytokine production (B) in this assay.

[0108] FIGS. 50A-50B. Effects of indicated spacers on R11-CAR-induced cytotoxicity in the presence of NucLight Red-labeled A549 target cells with ROR1 knocked out (A549_ROR1_KO-NLR) in donor D5018. FIG. 50A shows the AUC calculated for IncuCyte kinetic killing curves for each CAR variant with the indicated spacer. FIG. 50B is a bar graph showing concentrations of IFN-g in co-culture media 24 hours post co-culturing. A small population of ROR1+ cells is present in A549_ROR1_KO-NLR cell line, which accounts for the apparent killing (A) and cytokine production (B) in this assay.

[0109] FIG. 51. Bar graph showing cytokine secretion profile on R11 CAR-T cells derived from donor D7811 expressing CARs having the indicated spacers in the absence of target cells. No spacer resulted in elevated cytokine production in the absence of target cells to be considered as tonic signaling.

[0110] FIG. 52. Bar graph showing cytokine secretion profile on R11 CAR-T cells derived from donor D5018 expressing CARs having the indicated spacers in the absence of target cells. No spacer resulted in elevated cytokine production in the absence of target cells to be considered as tonic signaling.

[0111] FIG. 53A-53B. Scatter plots summarizing the effects of indicated spacer lengths on target-dependent cytokine secretion (dot size IFN-g), and killing AUC for the R11 CAR-T cells when co-cultured with human ROR1 expressing target cells. FIG. 53A: R11 CAR-T derived from donor D7811 was co-cultured with A549 cells. FIG. 53B: R11 CAR-T derived from donor D7811 was co-cultured with H1975 cells.

[0112] FIG. 54A-54B. Scatter plots summarizing the effects of indicated spacer lengths on target-dependent cytokine secretion (dot size IFN-g), and killing AUC for the R11 CAR-T cells when co-cultured with target cells. FIG. 54A: R11 CAR-T derived from donor D5018 was co-cultured with A549 cells. FIG. 54B: R11 CAR-T derived from donor D5018 was co-cultured with H1975 cells.

[0113] FIGS. 55A and 55B. Percentage of transduced cells measured by surface expression of transduction marker EGFRt on live primary T cells in donor D2735 (FIG. 55A) and donor D5018 (FIG. 55B).

[0114] FIGS. 55C and 55D. MFI for bound hROR1-Fc on live, transduced cells (EGFRt+ cells) in donor D2735 (FIG. 55C) and donor D5018 (FIG. 55D).

[0115] FIGS. 56A-56C. Effects of indicated spacers on R12-CAR-induced cytotoxicity in the presence of NucLight Red-labeled A549 target cells (A549-NLR) expressing human ROR1 target antigen in donor D2735. FIG. 56A shows the AUC calculated for IncuCyte kinetic killing curves for each CAR variant with the indicated spacer. FIGS. 56B and 56C are bar graphs showing concentrations of IFN-g (B) and IL-2 (C) in co-culture media 24 hours post co-culturing. Open bars indicate measurements outside of assay linear dynamic range, therefore should not be interpreted quantitatively.

[0116] FIGS. 57A-57C. Effects of indicated spacers on R12-CAR-induced cytotoxicity in the presence of NucLight Red-labeled A549 target cells (A549-NLR) expressing human ROR1 target antigen in donor D5018. FIG. 57A shows the AUC calculated for IncuCyte kinetic killing curves for each CAR variant with the indicated spacer. FIGS. 57B and 57C are bar graphs showing concentrations of IFN-g (B) and IL-2 (C) in co-culture media 24 hours post co-culturing.

[0117] FIGS. 58A-58C. Effects of indicated spacers on R12-CAR-induced cytotoxicity in the presence of NucLight Red-labeled H1975 target cells (H1975-NLR) expressing human ROR1 target antigen in donor D2735. FIG. 58A shows the AUC calculated for IncuCyte kinetic killing curves for each CAR variant with the indicated spacer. FIGS. 58B and 58C are bar graphs showing concentrations of IFN-g (B) and IL-2 (C) in co-culture media 24 hours post co-culturing. Open bars indicate measurements outside of assay linear dynamic range, therefore should not be interpreted quantitatively.

[0118] FIGS. 59A-59C. Effects of indicated spacers on R12-CAR-induced cytotoxicity in the presence of NucLight Red-labeled H1975 target cells (H1975-NLR) expressing human ROR1 target antigen in donor D5018. FIG. 59A shows the AUC calculated for IncuCyte kinetic killing curves for each CAR variant with the indicated spacer. FIGS. 59B and 59C are bar graphs showing concentrations of IFN-g (B) and IL-2 (C) in co-culture media 24 hours post co-culturing.

[0119] FIGS. 60A-60B. Effects of indicated spacers on R12-CAR-induced cytotoxicity in the presence of NucLight Red-labeled A549 target cells with ROR1 knocked out (A540_ROR1_KO-NLR) in donor D2735. FIG. 60A shows the AUC calculated for IncuCyte kinetic killing curves for each CAR variant with the indicated spacer. FIG. 60B is a bar graph showing concentrations of IFN-g in co-culture media 24 hours post co-culturing. A small population of ROR1+ cells is present in A549_ROR1_KO-NLR cell line, which accounts for the apparent killing (A) and cytokine production (B) in this assay.

[0120] FIGS. 61A-61B. Effects of indicated spacers on R12-CAR-induced cytotoxicity in the presence of NucLight Red-labeled A549 target cells with ROR1 knocked out (A549_ROR1_KO-NLR) in donor D5018. FIG. 61A shows the AUC calculated for IncuCyte kinetic killing curves for each CAR variant with the indicated spacer. FIG. 61B is a bar graph showing concentrations of IFN-g in co-culture media 24 hours post co-culturing. A small population of ROR1+ cells is present in A549_ROR1_KO-NLR cell line, which accounts for the apparent killing (A) and cytokine production (B) in this assay.

[0121] FIG. 62. Bar graph showing cytokine secretion profile on R12 CAR-T cells derived from donor D2735 expressing CARs having the indicated spacers in the absence of target cells. No spacer resulted in elevated cytokine production in the absence of target cells to be considered as tonic signaling.

[0122] FIG. 63. Bar graph showing cytokine secretion profile on R12 CAR-T cells derived from donor D5018 expressing CARs having the indicated spacers in the absence of target cells. No spacer resulted in elevated cytokine production in the absence of target cells to be considered as tonic signaling.

[0123] FIG. 64A-64B. Scatter plots summarizing the effects of indicated spacer lengths on target-dependent cytokine secretion (dot size IFN-g), and killing AUC for the R12 CAR-T cells when co-cultured with human ROR1 expressing target cells. FIG. 64A: R12 CAR-T derived from donor D2735 was co-cultured with A549 cells. FIG. 64B: R12 CAR-T derived from donor D2735 was co-cultured with H1975 cells.

[0124] FIG. 65A-65B. Scatter plots summarizing the effects of indicated spacer lengths on target-dependent cytokine secretion (dot size IFN-g), and killing AUC for the R12 CAR-T cells when co-cultured with target cells. FIG. 65A: R12 CAR-T derived from donor D5018 was co-cultured with A549 cells. FIG. 65B: R12 CAR-T derived from donor D5018 was co-cultured with H1975 cells.

[0125] FIGS. 66A and 66B. Percentage of transduced cells measured by surface expression of transduction marker EGFRt on live primary T cells in donor D2089 (FIG. 66A) and donor D5018 (FIG. 66B).

[0126] FIGS. 66C and 66D show the MFI for bound hROR1-Fc on live, transduced cells (EGFRt+ cells) in donor D2089 (FIG. 66C) and donor D5018 (FIG. 66D).

[0127] FIGS. 67A-67B. Effects of indicated spacers on 2A2-CAR-induced cytotoxicity in the presence of NucLight Red-labeled A549 target cells (A549-NLR) expressing human ROR1 target antigen in donor D2089. FIG. 67A shows the AUC calculated for IncuCyte kinetic killing curves for each CAR variant with the indicated spacer. FIG. 67B is a bar graph showing concentrations of IFN-g in co-culture media 24 hours post co-culturing.

[0128] FIGS. 68A-68B summarize the effects of indicated spacers on 2A2-CAR-induced cytotoxicity in the presence of NucLight Red-labeled A549 target cells (A549-NLR) expressing human ROR1 target antigen in donor D5018. FIG. 68A shows the AUC calculated for IncuCyte kinetic killing curves for each CAR variant with the indicated spacer. FIG. 68B is a bar graph showing concentrations of IFN-g in co-culture media 24 hours post co-culturing.

[0129] FIGS. 69A-69B summarize the effects of indicated spacers on 2A2-CAR-induced cytotoxicity in the presence of NucLight Red-labeled H1975 target cells (H1975-NLR) expressing human ROR1 target antigen in donor D2089. FIG. 69A shows the AUC calculated for IncuCyte kinetic killing curves for each CAR variant with the indicated spacer. FIG. 69B is a bar graph showing concentrations of IFN-g in co-culture media 24 hours post co-culturing. Open bars indicate measurements outside of assay linear dynamic range, therefore should not be interpreted quantitatively.

[0130] FIGS. 70A-70B summarize the effects of indicated spacers on 2A2-CAR-induced cytotoxicity in the presence of NucLight Red-labeled H1975 target cells (H1975-NLR) expressing human ROR1 target antigen in donor D5018. FIG. 70A shows the AUC calculated for IncuCyte kinetic killing curves for each CAR variant with the indicated spacer. FIG. 70B is a bar graph showing concentrations of IFN-g in co-culture media 24 hours post co-culturing. Open bars indicate measurements outside of assay linear dynamic range, therefore should not be interpreted quantitatively.

[0131] FIGS. 71A-71B. Effects of indicated spacers on 2A2-CAR-induced cytotoxicity in the presence of NucLight Red-labeled A549 target cells with ROR1 knocked out (A549_ROR1_KO-NLR) in donor D2089. FIG. 71A shows the AUC calculated for IncuCyte kinetic killing curves for each CAR variant with the indicated spacer. FIG. 71B is a bar graph showing concentrations of IFN-g in co-culture media 24 hours post co-culturing. A small population of ROR1+ cells is present in A549_ROR1_KO-NLR cell line, which accounts for the apparent killing (A) and cytokine production (B) in this assay.

[0132] FIGS. 72A-72B summarize the effects of indicated spacers on 2A2-CAR-induced cytotoxicity in the presence of NucLight Red-labeled A549 target cells with ROR1 knocked out (A549_ROR1_KO-NLR) in donor D5018. FIG. 72A shows the AUC calculated for IncuCyte kinetic killing curves for each CAR variant with the indicated spacer. FIG. 72B is a bar graph showing concentrations of IFN-g in co-culture media 24 hours post co-culturing. A small population of ROR1+ cells is present in A540_ROR1_KO-NLR cell line, which accounts for the apparent killing (A) and cytokine production (B) in this assay.

[0133] FIG. 73. Bar graph showing cytokine secretion profile on 2A2 CAR-T cells derived from donor D2089 expressing CARs having the indicated spacers in the absence of target cells. No spacer resulted in elevated cytokine production in the absence of target cells to be considered as tonic signaling.

[0134] FIG. 74. Bar graph showing cytokine secretion profile on 2A2 CAR-T cells derived from donor D5018 expressing CARs having the indicated spacers in the absence of target cells. No spacer resulted in elevated cytokine production in the absence of target cells to be considered as tonic signaling.

[0135] FIG. 75A-75B. Scatter plots summarizing the effects of indicated spacer lengths on target-dependent cytokine secretion (dot size IFN-g), and killing AUC for the 2A2 CAR-T cells when co-cultured with human ROR1 expressing target cells. FIG. 75A: 2A2 CAR-T derived from donor D2089 was co-cultured with A549 cells. FIG. 75B: 2A2 CAR-T derived from donor D2089 was co-cultured with H1975 cells.

[0136] FIG. 76A-76B. Scatter plots summarizing the effects of indicated spacer lengths on target-dependent cytokine secretion (dot size IFN-g), and killing AUC for the 2A2 CAR-T cells when co-cultured with target cells. FIG. 76A: 2A2 CAR-T derived from donor D5018 was co-cultured with A549 cells. FIG. 76B: 2A2 CAR-T derived from donor D5018 was co-cultured with H1975 cells.

[0137] FIGS. 77A-77E. Scatter plots summarizing the differential effects of indicated spacer lengths on target-dependent cytokine secretion (dot size IFN-g), and killing AUC for the FMC63, Her, R11, R12 and 2A2 CAR-T cells when co-cultured with target cells expressing human CARs. The scatter plots indicate the optimal spacer length for R12 (FIG. 77A), 2A2 (FIG. 77B), FMC63 (FIG. 77C), Her (FIG. 77D) and R11 (FIG. 77E) CARs.

[0138] FIG. 78A. Tumor growth over time in mice treated with 2,000,000 CAR-positive T cells with the indicated R12-spacer construct.

[0139] FIG. 78B. Body weight change over time in mice treated with 2,000,000 CAR-positive T cells with the indicated R12-spacer construct.

[0140] FIG. 79A. Tumor growth over time in mice treated with 500,000 CAR-positive T cells with the indicated R12-spacer construct.

[0141] FIG. 79B. Body weight change over time in mice treated with 500,000 CAR-positive T cells with the indicated R12-spacer construct.

[0142] FIG. 80. Percent survival over time in mice treated with 2,000,000 CAR-positive T cells with the indicated R12-spacer construct.

[0143] FIG. 81. Percent survival over time in mice treated with 500,000 CAR-positive T cells with the indicated R12-spacer construct.

[0144] FIG. 82. Number of CD3+ cells per mL blood on day 1 post T cell dose. High dose represents 2,000,000 CAR-positive T cells with the indicated R12-spacer construct. Low dose represents 500,000 CAR-positive T cells with the indicated R12-spacer construct.

[0145] FIG. 83. Number of CD3+ EGRF+ cells (i.e., CAR T cells) per mL blood on day 1 post T cell dose. High dose represents 2,000,000 CAR-positive T cells with the indicated R12-spacer construct. Low dose represents 500,000 CAR-positive T cells with the indicated R12-spacer construct.

[0146] FIGS. 84A-84L. Number of T cells per mL blood over time in mice treated with 2,000,000 CAR-positive T cells with the indicated R12-spacer construct. FIG. 84A shows blood PK for CD3+ cells (all T cells), FIG. 84B shows blood PK for CD3+ EGRF+ cells (all CAR T cells), FIG. 84C shows blood PK for CD3+ CAR+ cells (all CAR T cells), FIG. 84D shows blood PK for CD8+ cells (all CD3+ T cells), FIG. 84E shows blood PK for CD3+ EGRF+ cells (CD3+ CAR T cells), FIG. 84F shows blood PK for CD3+ CAR+ cells (CD3+ CAR T cells), FIG. 84G shows blood PK for CD8+ CD4+ cells (all CD3+ CD4+ T cells), FIG. 84H shows blood PK for CD3+ CD4+ EGRF+ cells (CD8+ CD4+ CAR T cells), FIG. 84I shows blood PK for CD3+ CD4+ CAR+ cells (CD3+ CD4+ CAR T cells), FIG. 84J shows blood PK for CD4+ cells (all CD4+ T cells), FIG. 84K shows blood PK for CD4+ EGRF+ cells (CD4+ CAR T cells), and FIG. 84L shows blood PK for CD4+ CAR+ cells (CD4+ CAR T cells).

[0147] FIGS. 85A-85L. Number of T cells per mL blood over time in mice treated with 500,000 CAR-positive T cells with the indicated R12-spacer construct. FIG. 85A shows blood PK for CD3+ cells (all T cells), FIG. 85B shows blood PK for CD3+ EGRF+ cells (all CAR T cells), FIG. 85C shows blood PK for CD3+ CAR+ cells (all CAR T cells), FIG. 85D shows blood PK for CD8+ cells (all CD3+ T cells), FIG. 85E shows blood PK for CD3+ EGRF+ cells (CD3+ CAR T cells), FIG. 85F shows blood PK for CD3+ CAR+ cells (CD3+ CAR T cells), FIG. 85G shows blood PK for CD8+ CD4+ cells (all CD3+ CD4+ T cells), FIG. 85H shows blood PK for CD3+ CD4+ EGRF+ cells (CD8+ CD4+ CAR T cells), FIG. 85I shows blood PK for CD3+ CD4+ CAR+ cells (CD3+ CD4+ CAR T cells), FIG. 85J shows blood PK for CD4+ cells (all CD4+ T cells), FIG. 85K shows blood PK for CD4+ EGRF+ cells (CD4+ CAR T cells), and FIG. 85L shows blood PK for CD4+ CAR+ cells (CD4+ CAR T cells).

### DETAILED DESCRIPTION

[0148] The present disclosure is directed to CARs comprising spacers derived from immunoglobulin (Ig) hinge and/or constant region sequences, polynucleotides encoding such CARs, cells expressing the CARs, and methods for their use. Non-limiting examples of the various aspects are shown in the present disclosure. In some aspects, CAR spacers of the present disclosure are fragments of IgA1, IgA2, IgG1, IgG2, IgG3, IgG4, IgD, IgE or IgM hinge and/or constant regions. In some aspects, the CAR spacer comprises a subsequence from an IgM hinge and/or from a constant region, and further contains a short terminal sequence derived from other region(s), e.g., a CAR spacer can comprise a hinge subsequence and a CH1 and/or a CH2 subsequence. In some aspects, a CAR spacer can comprise a sequence connecting two constant regions.

[0149] In some aspects, the CAR spacers derived from constant regions (e.g., heavy chain constant regions and/or light chain constant regions) correspond to unstructured sequences with a high content of Proline, Cysteine, Glycine, or combinations thereof, and generally correspond to solvent accessible loops. See, e.g., FIG. 41 and FIG. 42. For example, Spacer 15 corresponds to the N-terminal region of the flexible loop connecting β-strand A and β-strand B of the CH2 region of IgG1, IgG2, IgG3, or IgG4. Accordingly, in some aspects, a CAR spacer of the present disclosure comprises, consists, or consists essentially of an unstructured flexible loop connecting secondary structure elements (e.g., a helices, (3 strands, or combinations thereof) in an IgA1, IgA2, IgG1, IgG2, IgG3, IgG4, IgD, IgE, or IgM human immunoglobulin, or a fragment of such loop. In some aspects, the loop sequence is obtained from a non-human immunoglobulin. The location of loop sequences suitable to be used as CAR spacers of the present disclosure can be identified by a person skilled in the art, e.g., via structural assignment of amino acid residues in a PDB file using a program such as DSSP, P-SEA, DEFINE_S, SSTRUC, STRIDE, PROSS, or PALSSE. In some aspects, the sequence suitable as a CAR spacer of the present disclosure is an immunoglobulin domain loop sequence comprising at least 1, 2, 3, 4, 5 or 6 proline residues. In some aspects, the sequence suitable as a CAR spacer of the present disclosure is an immunoglobulin domain loop sequence wherein at least about 30%, about 40%, about 50%, about 60%, about 70%, about 80%, or about 90% of amino acid residues are Proline, Cysteine, Glycine, or combinations thereof.

[0150] In some aspects, the CAR spacers of the present disclosure are rationally designed based, e.g., on measurement of the distance between the epitope targeted by the CAR binding moiety and the surface of plasma membrane of the target cell, and/or the intermembrane distance in the signaling synapse. In some aspects, the CAR spacers of the present disclosure are modular sequences comprising at least one polypeptide sequence derived from an IgA1, IgA2, IgG1, IgG2, IgG3, IgG4, IgD, IgE or IgM hinge and/or constant region.

[0151] Before the present disclosure is described in greater detail, it is to be understood that this disclosure is not limited to the particular compositions or process steps described, as such can, of course, vary. As will be apparent to those of skill in the art upon reading this disclosure, each of the individual aspects described and illustrated herein has discrete components and features which can be readily separated from or combined with the features of any of the other several aspects without departing from the scope or spirit of the present disclosure. Any recited method can be carried out in the order of events recited or in any other order which is logically possible.

[0152] Headings provided herein are not limitations of the various aspects of the disclosure, which can be defined by reference to the specification as a whole. It is also to be understood that the terminology used herein is for the purpose of describing particular aspects only, and is not intended to be limiting, since the scope of the present disclosure will be limited only by the appended claims.

[0153] Accordingly, the terms defined immediately below are more fully defined by reference to the specification in its entirety.

### I. Terms

[0154] In order that the present description can be more readily understood, certain terms are first defined. Except as otherwise expressly provided herein, each of the following terms shall have the meaning set forth below. Additional definitions are set forth throughout the detailed description.

[0155] It is to be noted that the term “a” or “an” entity refers to one or more of that entity; for example, “a nucleotide sequence,” is understood to represent one or more nucleotide sequences. As such, the terms “a” (or “an”), “one or more,” and “at least one” can be used interchangeably herein. It is further noted that the claims can be drafted to exclude any optional element. As such, this statement is intended to serve as antecedent basis for use of such exclusive terminology as “solely,” “only” and the like in connection with the recitation of claim elements, or use of a negative limitation.

[0156] Furthermore, “and/or” where used herein is to be taken as specific disclosure of each of the two specified features or components with or without the other. Thus, the term “and/or” as used in a phrase such as “A and/or B” herein is intended to include “A and B,” “A or B,” “A” (alone), and “B” (alone). Likewise, the term “and/or” as used in a phrase such as “A, B, and/or C” is intended to encompass each of the following aspects: A, B, and C; A, B, or C; A or C; A or B; B or C; A and C; A and B; B and C; A (alone); B (alone); and C (alone).

[0157] It is understood that wherever aspects are described herein with the language “comprising,” otherwise analogous aspects described in terms of “consisting of” and/or “consisting essentially of” are also provided.

[0158] Unless defined otherwise, all technical and scientific terms used herein have the same meaning as commonly understood by one of ordinary skill in the art to which this disclosure is related. For example, the Concise Dictionary of Biomedicine and Molecular Biology, Juo, Pei-Show, 2nd ed., 2002, CRC Press; The Dictionary of Cell and Molecular Biology, 3rd ed., 1999, Academic Press; and the Oxford Dictionary Of Biochemistry And Molecular Biology, Revised, 2000, Oxford University Press, provide one of skill with a general dictionary of many of the terms used in this disclosure.

[0159] Units, prefixes, and symbols are denoted in their Système International de Unites (SI) accepted form. Numeric ranges are inclusive of the numbers defining the range. Where a range of values is recited, it is to be understood that each intervening integer value, and each fraction thereof, between the recited upper and lower limits of that range is also specifically disclosed, along with each subrange between such values. The upper and lower limits of any range can independently be included in or excluded from the range, and each range where either, neither or both limits are included is also encompassed within the disclosure. Thus, ranges recited herein are understood to be shorthand for all of the values within the range, inclusive of the recited endpoints. For example, a range of 1 to 10 is understood to include any number, combination of numbers, or sub-range from the group consisting of 1, 2, 3, 4, 5, 6, 7, 8, 9, and 10.

[0160] Where a value is explicitly recited, it is to be understood that values which are about the same quantity or amount as the recited value are also within the scope of the disclosure. Where a combination is disclosed, each subcombination of the elements of that combination is also specifically disclosed and is within the scope of the disclosure. Conversely, where different elements or groups of elements are individually disclosed, combinations thereof are also disclosed. Where any element of a disclosure is disclosed as having a plurality of alternatives, examples of that disclosure in which each alternative is excluded singly or in any combination with the other alternatives are also hereby disclosed; more than one element of a disclosure can have such exclusions, and all combinations of elements having such exclusions are hereby disclosed.

[0161] Nucleotides are referred to by their commonly accepted single-letter codes. Unless otherwise indicated, nucleotide sequences are written left to right in 5′ to 3′ orientation. Nucleotides are referred to herein by their commonly known one-letter symbols recommended by the IUPAC-IUB Biochemical Nomenclature Commission. Accordingly, ‘a’ represents adenine, ‘c’ represents cytosine, ‘g’ represents guanine, ‘t’ represents thymine, and ‘u’ represents uracil.

[0162] Amino acid sequences are written left to right in amino to carboxy orientation. Amino acids are referred to herein by either their commonly known three letter symbols or by the one-letter symbols recommended by the IUPAC-IUB Biochemical Nomenclature Commission.

[0163] The term “about” is used herein to mean approximately, roughly, around, or in the regions of When the term “about” is used in conjunction with a numerical range, it modifies that range by extending the boundaries above and below the numerical values set forth. In general, the term “about” can modify a numerical value above and below the stated value by a variance of, e.g., 10 percent, up or down (higher or lower).

[0164] The terms “administration,” “administering,” and grammatical variants thereof refer to introducing a composition of the present disclosure (e.g., a polynucleotide encoding a CAR or a cell expressing a CAR), into a subject via a pharmaceutically acceptable route. The introduction of a composition of the present disclosure (e.g., a polynucleotide encoding a CAR or a cell expressing a CAR), into a subject is by any suitable route, including intratumorally, orally, pulmonarily, intranasally, parenterally (intravenously, intra-arterially, intramuscularly, intraperitoneally, or subcutaneously), rectally, intralymphatically, intrathecally, periocularly or topically.

[0165] Administration includes self-administration and the administration by another. A suitable route of administration allows the composition or the agent to perform its intended function. For example, if a suitable route is intravenous, the composition is administered by introducing the composition or agent into a vein of the subject.

[0166] The term “amino acid substitution” refers to replacing an amino acid residue present in a parent or reference sequence (e.g., a wild type sequence) with another amino acid residue. An amino acid can be substituted in a parent or reference sequence (e.g., a wild type polypeptide sequence), for example, via chemical peptide synthesis or through recombinant methods known in the art. A reference to a “substitution at position X” refers to the substitution of an amino acid present at position X with an alternative amino acid residue. Substitution patterns can be described according to the schema AnY, wherein A is the single letter code corresponding to the amino acid naturally or originally present at position n, and Y is the substituting amino acid residue. In other aspects, substitution patterns can be described according to the schema An(YZ), wherein A is the single letter code corresponding to the amino acid residue substituting the amino acid naturally or originally present at position n, and Y and Z are alternative substituting amino acid residues that can replace A.

[0167] As used herein, the term “approximately,” as applied to one or more values of interest, refers to a value that is similar to a stated reference value. The term “approximately” refers to a range of values that fall within 10%, 9%, 8%, 7%, 6%, 5%, 4%, 3%, 2%, 1%, or less in either direction (greater than or less than) of the stated reference value unless otherwise stated or otherwise evident from the context (except where such number would exceed 100% of a possible value).

[0168] As used herein, the term “conserved” refers to nucleotides or amino acid residues of a polynucleotide sequence or polypeptide sequence, respectively, that are those that occur unaltered in the same position of two or more sequences being compared. Nucleotides or amino acids that are relatively conserved are those that are conserved amongst more related sequences than nucleotides or amino acids appearing elsewhere in the sequences.

[0169] In some aspects, two or more sequences are said to be “completely conserved” or “identical” if they are 100% identical to one another. In some aspects, two or more sequences are said to be “highly conserved” if they are at least about 70% identical, at least about 75% identical, at least about 80% identical, at least about 85% identical, at least about 90% identical, or at least about 95% identical to one another. In some aspects, two or more sequences are said to be “highly conserved” if they are about 70% identical, about 75% identical, about 80% identical, about 85% identical, about 90% identical, about 95% identical, about 98% identical, or about 99% identical to one another. In some aspects, two or more sequences are said to be “conserved” if they are at least about 30% identical, at least about 35% identical, at least about 40% identical, at least about 45% identical, at least about 50% identical, at least about 55%, at least about 60% identical, at least about 65% identical, at least about 70% identical, at least about 75% identical, at least about 80% identical, at least about 85% identical, at least about 90% identical, or at least about 95% identical to one another. In some aspects, two or more sequences are said to be “conserved” if they are about 30% identical, about 35% identical, about 40% identical, about 45% identical, about 50% identical, about 55% identical, about 60% identical, about 65% identical, about 70% identical, about 75% identical, about 80% identical, about 85% identical, about 90% identical, about 95% identical, about 98% identical, or about 99% identical to one another. Conservation of sequence may apply to the entire length of a polynucleotide or polypeptide or may apply to a portion, region or feature thereof.

[0170] “Derived from” as that term is used herein, indicates a relationship (e.g., structural similarity) between a first and a second molecule. For example, in the case of a CAR spacer of the present disclosure comprising an amino acid sequence derived from a human immunoglobulin sequence (e.g., a hinge and/or a constant region sequence), the sequence that is derived from the human immunoglobulin sequence (e.g., a hinge and/or a constant region sequence) can comprise or consist of a full hinge, a hinge fragment, a full hinge or a fragment of an hinge plus additional residues adjacent to the hinge in a wild type immunoglobulin (e.g., one or more amino acids from a constant domain such as a CH1 or CH2 domain), or can comprise or consist of the full sequence of a loop region, a loop region fragment, or a loop region fragment plus additional residues adjacent to the loop in a wild type immunoglobulin (e.g., one or more amino acids from a secondary structure element, e.g., a β-sheet, adjacent to a loop region in a CH1, CH2 or CH3 domain). In some aspects, a spacer derived from constant domain can be derived from a light chain constant domain (CL).

[0171] The term “loop region” as used herein refers to a primary sequence of amino acid residues which connects two regions comprising secondary structure, such as an α-helix or β-sheet, in the immediate N-terminal and C-terminal directions of primary structure from the loop region. Examples of loop regions include, but are not limited to, CH2 or CH3 loop regions. The immunoglobulin fold comprises a 2-layer sandwich of 7-9 antiparallel β-strands arranged in two β-sheets with a Greek key topology. See FIG. 41. Accordingly, constant domain derived CAR spacers of the present disclosure can comprise, consist, or consist essentially of a loop sequence (or a fragment thereof) connecting β-sheet A and β-sheet B, β-sheet B and β-sheet C, β-sheet C and β-sheet C′, β-sheet C′ and β-sheet C″, β-sheet C″ and β-sheet D, β-sheet D and β-sheet E, β-sheet E and β-sheet F, or β-sheet F and β-sheet G, in an immunoglobulin domain, e.g., a constant immunoglobulin domain (e.g., CH1, CH2, CH3, or CL).

[0172] CAR spacers derived from a human Ig immunoglobulin (e.g., a hinge and/or a constant region sequence), disclosed herein also encompass sequences generated by covalently linking via peptidic bonds a hinge region derived sequence as described above, i.e., the spacer can be a polymer comprising multiple repeats of a full hinge, fragments thereof, or combinations thereof.

[0173] In some aspects, a nucleic acid sequence that is derived from a second nucleic acid sequence can include a nucleotide sequence that is identical or substantially similar to the nucleotide sequence of the second nucleic acid sequence. In the case of nucleotides or polypeptides, the derived species can be obtained by, e.g., naturally occurring mutagenesis, artificial directed mutagenesis or artificial random mutagenesis. The mutagenesis used to derive nucleotides or polypeptides can be intentionally directed or intentionally random, or a mixture of each. The mutagenesis of a nucleotide or polypeptide to create a different nucleotide or polypeptide derived from the first can be a random event (e.g., caused by polymerase infidelity) and the identification of the derived nucleotide or polypeptide can be made by appropriate screening methods, e.g., as discussed herein. Mutagenesis of a polypeptide typically entails manipulation of the polynucleotide that encodes the polypeptide.

[0174] In some aspects, a nucleotide or amino acid sequence that is derived from a second nucleotide or amino acid sequence has a sequence identity of at least about 50%, at least about 51%, at least about 52%, at least about 53%, at least about 54%, at least about 55%, at least about 56%, at least about 57%, at least about 58%, at least about 59%, at least about 60%, at least about 61%, at least about 62%, at least about 63%, at least about 64%, at least about 65%, at least about 66%, at least about 67%, at least about 68%, at least about 69%, at least about 70%, at least about 71%, at least about 72%, at least about 73%, at least about 74%, at least about 75%, at least about 76%, at least about 77%, at least about 78%, at least about 79%, at least about 80%, at least about 81%, at least about 82%, at least about 83%, at least about 84%, at least about 85%, at least about 86%, at least about 87%, at least about 88%, at least about 89%, at least about 90%, at least about 91%, at least about 92%, at least about 93%, at least about 94%, at least about 95%, at least about 96%, at least about 97%, at least about 98%, at least about 99%, or about 100% to the second nucleotide or amino acid sequence, respectively, wherein the first nucleotide or amino acid sequence retains the biological activity of the second nucleotide or amino acid sequence.

[0175] The terms “complementary” and “complementarity” refer to two or more oligomers (i.e., each comprising a nucleobase sequence), or between an oligomer and a target gene, that are related with one another by Watson-Crick base-pairing rules. For example, the nucleobase sequence “T-G-A (5′→3′),” is complementary to the nucleobase sequence “A-C-T (3′→5′).” Complementarity may be “partial,” in which less than all of the nucleobases of a given nucleobase sequence are matched to the other nucleobase sequence according to base pairing rules. For example, in some aspects, complementarity between a given nucleobase sequence and the other nucleobase sequence can be about 70%, about 75%, about 80%, about 85%, about 90% or about 95%. Or, there may be “complete” or “perfect” (100%) complementarity between a given nucleobase sequence and the other nucleobase sequence to continue the example. The degree of complementarity between nucleobase sequences has significant effects on the efficiency and strength of hybridization between the sequences.

[0176] The term “downstream” refers to a nucleotide sequence that is located 3′ to a reference nucleotide sequence. In certain aspects, downstream nucleotide sequences relate to sequences that follow the starting point of transcription. For example, the translation initiation codon of a gene is located downstream of the start site of transcription. The term “upstream” refers to a nucleotide sequence that is located 5′ to a reference nucleotide sequence.

[0177] As used herein, the terms “antigen-binding domain” and “antibody” encompass an immunoglobulin whether natural or partly or wholly synthetically produced, and antigen-binding portions thereof. The term also covers any protein having a binding domain that is homologous to an immunoglobulin binding domain. “Antigen-binding domain” and “antibody” further include a polypeptide comprising a framework region from an immunoglobulin gene or portions thereof that specifically binds and recognizes an antigen, and comprises at least one CDR. Use of the terms “antigen-binding domain” and “antibody” is meant to include whole antibodies, polyclonal, monoclonal and recombinant antibodies, portions thereof, and further includes single-chain antibodies, humanized antibodies, murine antibodies, chimeric, mouse-human, mouse-primate, primate-human monoclonal antibodies, anti-idiotype antibodies, antibody constructs, such as, e.g., scFv, (scFv)₂, Fab, Fab′, and F(ab′)₂, F(ab1)₂, Fv, dAb, and Fd, disulfide-linked Fvs (dsFcs), and antibody-related polypeptides.

[0178] In some aspects, an “antigen-binding portion” refers to a polypeptide sequence that makes contacts with the antigen, including but not limited to CDRs derived from an antibody.

[0179] An antigen-binding portion can also be incorporated into single domain antibodies, maxibodies, minibodies, nanobodies, intrabodies, diabodies, triabodies, tetrabodies, v-NAR and bis-scFv (see, e.g., Hollinger and Hudson, Nature Biotechnology 23:1126-1136, 2005). Antigen-binding portions can also be grafted into scaffolds based on polypeptides such as a fibronectin type III (Fn3)(see U.S. Pat. No. 6,703,199, which describes fibronectin polypeptide minibodies). Thus, the terms “antigen-binding domain” and “antibody” include also antibody mimics based on the scaffold of the fibronectin type III domain (monobodies), other scaffolding systems (e.g., tenascin) in which one or more CDRs are grafted, aptamers, etc.

[0180] The terms “antigen-binding domain” and “antibody” also include other suitable antigen-binding domains that can be used according to the present disclosure, e.g., nanobody, VHH antibody, DARPin (designed ankyrin repeat proteins), affibody, monobody, adnectin, alphabody, Albumin-binding domain, Adhiron, Affilin and other gamma-B crystallin-derived artificial proteins, Affimer, Affitin (NANOFITIN™), Anticalin, Armadillo repeat proteins (ARM-repeat protein such as, e.g., β-catenin, a-importing, plakoglobin, adenomatous polyposis coli, ARMC4, ARMCX3, etc.), Atrimer (e.g., tetranectin and derived proteins), Avimer/Maxibody, Centyrin, Fynomer and other Fyn SH3 domain-derived proteins, Kunitz domain, Obody/OB-fold, Pronectin, Repebody, or any synthetic and/or computationally designed binding-protein or scaffold.

[0181] The modular architecture of antibodies has been exploited to create more than 60 different bispecific or multispecific antibody formats. Accordingly, in some aspects, the antibody can be in a format selected, e.g., from crossMab, DAF (Dual Action Fab) (two-in-one), DAF (four-in-one), DutaMab, DT-IgG, Knobs-in-holes common LC, Knobs-in-holes assembly, Charge pair, Fab-arm exchange, SEEDbody, Triomab, LUZ-Y (bispecific antibody with a leucize zipper inducing heterodimerization of two HCs), Fcab, Kλ-body, Orthogonal Fab, DVD-IgG (dual variable domain IgG), IgG(H)-scFv, scFv-(H)IgG, IgG(L)-scFv, scFv-(L)IgG, IgG(L,H)-Fv, IgG(H)-V, V(H)-IgG, IgG(L)-V, V(L)-IgG, KIH IgG-scFab, 2scFv-IgG, IgG-2scFv, scFv4-Ig, Zybody, DVI-IgG (four-in-one), Nanobody, Nanobody-HSA, BiTE (bispecific T cell engager), Diabody, DART (dual-affinity-retargeting), TandAb (tandem antibody), scDiabody, scDiabody-CH3, Triple Body, Miniantibody, Minibody, TriBi minibody, scFv-CH3 KIH, Fab-scFv, scFv-CH-CL-scFv, F(ab′)2, F(ab′)2-ScFv2, scFv-KIH, Fab-scFv-Fc, Tetravalent HC Ab, scDiabody-Fc, Diabody-Fc, Tandem scFv-Fc, Intrabody, Dock and Locck, ImmTAC, HSAbody, scDiabody-HSA, Tandem scFv-Toxin, IgG-IgG, Cov-X-Body, and scFv1-PEG-scFV2.

[0182] “Antigen-binding domain” and “antibody” also include bispecific and multispecific antibodies so long as they exhibit the desired biological activity or function. In some aspects, the CAR of the present disclosure comprising an extracellular antigen-binding domain, e.g., an scFv.

[0183] The term “scFv” refers to a fusion protein comprising at least one antibody portion comprising a variable region of a light chain and at least one antibody portion comprising a variable region of a heavy chain, wherein the light and heavy chain variable regions are contiguously linked, e.g., via a synthetic linker, e.g., a short flexible polypeptide linker, and capable of being expressed as a single chain polypeptide, and wherein the scFv retains the specificity of the intact antibody from which it is derived. Unless specified, as used herein an scFv may have the VL and VH variable regions in either order, e.g., with respect to the N-terminal and C-terminal ends of the polypeptide, the scFv may comprise VL-linker-VH or may comprise VH-linker-VL.

[0184] The term “complementarity determining region” or “CDR,” as used herein, refers to the sequences of amino acids within antibody variable regions which confer antigen specificity and binding affinity. For example, in general, there are three CDRs in each heavy chain variable region (e.g., HCDR1, HCDR2, and HCDR3) and three CDRs in each light chain variable region (LCDR1, LCDR2, and LCDR3). The precise amino acid sequence boundaries of a given CDR can be determined using any of a number of well-known schemes, including those described by Kabat et al. (1991), “Sequences of Proteins of Immunological Interest,” 5th Ed. Public Health Service, National Institutes of Health, Bethesda, Md. (“Kabat” numbering scheme), Al-Lazikani et al., (1997) JMB 273,927-948 (“Chothia” numbering scheme), or a combination thereof. Under the Kabat numbering scheme, in some embodiments, the CDR amino acid residues in the heavy chain variable domain (VH) are numbered 31-35 (HCDR1), 50-65 (HCDR2), and 95-102 (HCDR3); and the CDR amino acid residues in the light chain variable domain (VL) are numbered 24-34 (LCDR1), 50-56 (LCDR2), and 89-97 (LCDR3). Under the Chothia numbering scheme, in some embodiments, the CDR amino acids in the VH are numbered 26-32 (HCDR1), 52-56 (HCDR2), and 95-102 (HCDR3); and the CDR amino acid residues in the VL are numbered 26-32 (LCDR1), 50-52 (LCDR2), and 91-96 (LCDR3). In a combined Kabat and Chothia numbering scheme, in some embodiments, the CDRs correspond to the amino acid residues that are part of a Kabat CDR, a Chothia CDR, or both. For instance, in some embodiments, the CDRs correspond to amino acid residues 26-35 (HCDR1), 50-65 (HCDR2), and 95-102 (HCDR3) in a VH, e.g., a mammalian VH, e.g., a human VH; and amino acid residues 24-34 (LCDR1), 50-56 (LCDR2), and 89-97 (LCDR3) in a VL, e.g., a mammalian VL, e.g., a human VL.

[0185] The term “antigen” refers to a molecule that provokes an immune response. This immune response may involve either antibody production, or the activation of specific immunologically-competent cells, or both. The skilled artisan will understand that any macromolecule, including virtually all proteins or peptides, can serve as an antigen. Furthermore, antigens can be derived from recombinant or genomic DNA.

[0186] As used herein, the term “epitope” refers to the moieties of an antigen that specifically interact with an antibody molecule. Such moieties, referred to herein as epitopic determinants, typically comprise, or are part of, elements such as amino acid side chains or sugar side chains. An epitopic determinate can be defined, e.g., by methods known in the art, e.g., by crystallography or by hydrogen-deuterium exchange. At least one or some of the moieties on the antibody molecule that specifically interact with an epitopic determinant are typically located in a CDR(s). Typically an epitope has a specific three dimensional structural characteristics. Typically an epitope has specific charge characteristics. Some epitopes are linear epitopes while others are conformational epitopes.

[0187] The term “autologous” refers to any material derived from the same individual to whom it is later to be re-introduced into the individual.

[0188] The term “Chimeric Antigen Receptor” or alternatively a “CAR” refers to a set of polypeptides, typically two in the simplest form, which when in an immune effector cell, provides the cell with specificity for a target cell, typically a cancer cell, and with intracellular signal generation. In some aspects, a CAR comprises at least an extracellular antigen-binding domain, a transmembrane domain and a cytoplasmic signaling domain (also referred to as “an intracellular signaling domain”) comprising a functional signaling domain derived from a stimulatory molecule and/or costimulatory molecule as defined below. In some aspects, the set of polypeptides are in the same polypeptide chain, e.g., comprise a chimeric fusion protein. In some aspects, the set of polypeptides are not contiguous with each other, e.g., are in different polypeptide chains. In some aspects, the set of polypeptides include a dimerization switch that, upon the presence of a dimerization molecule, can couple the polypeptides to one another, e.g., can couple an antigen-binding domain to an intracellular signaling domain. In some aspects, the stimulatory molecule of the CAR is the zeta chain associated with the T cell receptor complex (CD3 zeta). In some aspects, the cytoplasmic signaling domain comprises a primary signaling domain (e.g., a primary signaling domain of CD3 zeta). In some aspects, the cytoplasmic signaling domain further comprises one or more functional signaling domains derived from at least one costimulatory molecule defined below. In some aspects, the costimulatory molecule is chosen from the costimulatory molecules described herein, e.g., 4-1BB, CD27, and/or CD28.

[0189] In some aspects, the CAR comprises a chimeric fusion protein comprising an antigen-binding domain, a transmembrane domain and an intracellular signaling domain comprising a functional signaling domain derived from a stimulatory molecule, wherein the antigen-binding domain and the transmembrane domain are linked by a CAR spacer. In some aspects, the CAR comprises a chimeric fusion protein comprising an antigen-binding domain linked to a transmembrane domain via a CAR spacer and an intracellular signaling domain comprising a functional signaling domain derived from a costimulatory molecule and a functional signaling domain derived from a stimulatory molecule. In some aspects, the CAR comprises a chimeric fusion protein comprising an antigen-binding domain linked to a transmembrane domain via a CAR spacer and an intracellular signaling domain comprising two functional signaling domains derived from one or more costimulatory molecule(s) and a functional signaling domain derived from a stimulatory molecule. In some aspects, the CAR comprises a chimeric fusion protein comprising an antigen-binding domain linked to a transmembrane domain via a CAR spacer and an intracellular signaling domain comprising at least two functional signaling domains derived from one or more costimulatory molecule(s) and a functional signaling domain derived from a stimulatory molecule. In some aspects, the CAR comprises an optional leader sequence at the amino-terminus (N-terminus) of the CAR. In some aspects, the CAR further comprises a leader sequence at the N-terminus of the antigen-binding domain, wherein the leader sequence is optionally cleaved from the antigen-binding domain (e.g., a scFv) during cellular processing and localization of the CAR to the cellular membrane.

[0190] The term “cancer” refers to a disease characterized by the uncontrolled growth of aberrant cells. Cancer cells can spread locally or through the bloodstream and lymphatic system to other parts of the body. Examples of various cancers are described herein and include but are not limited to, breast cancer, prostate cancer, ovarian cancer, cervical cancer, skin cancer, pancreatic cancer, colorectal cancer, renal cancer, liver cancer, brain cancer, lymphoma, leukemia, lung cancer and the like. The terms “tumor” and “cancer” are used interchangeably herein, e.g., both terms encompass solid and liquid, e.g., diffuse or circulating, tumors. As used herein, the term “cancer” or “tumor” includes premalignant, as well as malignant cancers and tumors.

[0191] The terms “cancer associated antigen” or “tumor antigen” or variants thereof interchangeably refer to a molecule (typically protein, carbohydrate or lipid) that is preferentially expressed on the surface of a cancer cell, either entirely or as a fragment (e.g., MHC/peptide), in comparison to a normal cell, and which is useful for the preferential targeting of a pharmacological agent to the cancer cell. In some aspects, a tumor antigen is a marker expressed by both normal cells and cancer cells, e.g., a lineage marker, e.g., CD19 on B cells. In certain aspects, the tumor antigen is derived from, cancers including but not limited to primary or metastatic melanoma, thymoma, lymphoma, sarcoma, lung cancer, liver cancer, non-Hodgkin lymphoma, Hodgkin lymphoma, leukemias, uterine cancer, cervical cancer, bladder cancer, kidney cancer and adenocarcinomas such as breast cancer, prostate cancer, ovarian cancer, pancreatic cancer, and the like.

[0192] In some aspects, the tumor antigen is an antigen that is common to a specific proliferative disorder. In some aspects, a cancer-associated antigen is a cell surface molecule that is overexpressed in a cancer cell in comparison to a normal cell, for instance, 1-fold over expression, 2-fold overexpression, 3-fold overexpression or more in comparison to a normal cell. In some aspects, a cancer-associated antigen is a cell surface molecule that is inappropriately synthesized in the cancer cell, for instance, a molecule that contains deletions, additions or mutations in comparison to the molecule expressed on a normal cell. In some aspects, a cancer-associated antigen will be expressed exclusively on the cell surface of a cancer cell, entirely or as a fragment (e.g., MHC/peptide), and not synthesized or expressed on the surface of a normal cell.

[0193] The term “anti-cancer effect” refers to a biological effect which can be manifested by various means, including but not limited to, e.g., a decrease in tumor volume, a decrease in the number of cancer cells, a decrease in the number of metastases, an increase in life expectancy, decrease in cancer cell proliferation, decrease in cancer cell survival, or amelioration of various physiological symptoms associated with the cancerous condition.

[0194] An “anti-cancer effect” can also be manifested by the ability of the CAR, polynucleotides encoding CARs, vectors, and cells described herein in prevention of the occurrence of cancer in the first place. The term “anti-tumor effect” refers to a biological effect which can be manifested by various means, including but not limited to, e.g., a decrease in tumor volume, a decrease in the number of tumor cells, a decrease in tumor cell proliferation, or a decrease in tumor cell survival.

[0195] A “conservative amino acid substitution” is one in which the amino acid residue is replaced with an amino acid residue having a similar side chain. Families of amino acid residues having similar side chains have been defined in the art, including basic side chains (e.g., lysine, arginine, histidine), acidic side chains (e.g., aspartic acid, glutamic acid), uncharged polar side chains (e.g., glycine, asparagine, glutamine, serine, threonine, tyrosine, cysteine), nonpolar side chains (e.g., alanine, valine, leucine, isoleucine, proline, phenylalanine, methionine, tryptophan), beta-branched side chains (e.g., threonine, valine, isoleucine) and aromatic side chains (e.g., tyrosine, phenylalanine, tryptophan, histidine). Thus, if an amino acid in a polypeptide is replaced with another amino acid from the same side chain family, the substitution is considered to be conservative. In another aspect, a string of amino acids can be conservatively replaced with a structurally similar string that differs in order and/or composition of side chain family members.

[0196] Non-conservative amino acid substitutions include those in which (i) a residue having an electropositive side chain (e.g., Arg, His or Lys) is substituted for, or by, an electronegative residue (e.g., Glu or Asp), (ii) a hydrophilic residue (e.g., Ser or Thr) is substituted for, or by, a hydrophobic residue (e.g., Ala, Leu, Ile, Phe or Val), (iii) a cysteine or proline is substituted for, or by, any other residue, or (iv) a residue having a bulky hydrophobic or aromatic side chain (e.g., Val, His, Ile or Trp) is substituted for, or by, one having a smaller side chain (e.g., Ala or Ser) or no side chain (e.g., Gly).

[0197] Other amino acid substitutions can also be used. For example, for the amino acid alanine, a substitution can be taken from any one of D-alanine, glycine, beta-alanine, L-cysteine and D-cysteine. For lysine, a replacement can be any one of D-lysine, arginine, D-arginine, homo-arginine, methionine, D-methionine, ornithine, or D-ornithine. Generally, substitutions in functionally important regions that can be expected to induce changes in the properties of isolated polypeptides are those in which (i) a polar residue, e.g., serine or threonine, is substituted for (or by) a hydrophobic residue, e.g., leucine, isoleucine, phenylalanine, or alanine; (ii) a cysteine residue is substituted for (or by) any other residue; (iii) a residue having an electropositive side chain, e.g., lysine, arginine or histidine, is substituted for (or by) a residue having an electronegative side chain, e.g., glutamic acid or aspartic acid; or (iv) a residue having a bulky side chain, e.g., phenylalanine, is substituted for (or by) one not having such a side chain, e.g., glycine. The likelihood that one of the foregoing non-conservative substitutions can alter functional properties of the protein is also correlated to the position of the substitution with respect to functionally important regions of the protein: some non-conservative substitutions can accordingly have little or no effect on biological properties.

[0198] In the content of the present disclosure, the terms “mutation” and “amino acid substitution” as defined above (sometimes referred simply as a “substitution”) are considered interchangeable.

[0199] In the context of the present disclosure, substitutions (even when they are referred to as amino acid substitution) are conducted at the nucleic acid level, i.e., substituting an amino acid residue with an alternative amino acid residue is conducted by substituting the codon encoding the first amino acid with a codon encoding the second amino acid.

[0200] As used herein, the term “homology” refers to the overall relatedness between polymeric molecules, e.g. between nucleic acid molecules (e.g. DNA molecules and/or RNA molecules) and/or between polypeptide molecules. Generally, the term “homology” implies an evolutionary relationship between two molecules. Thus, two molecules that are homologous will have a common evolutionary ancestor. In the context of the present disclosure, the term homology encompasses both to identity and similarity.

[0201] In some aspects, polymeric molecules are considered to be “homologous” to one another if at least about 25%, at least about 30%, at least about 35%, at least about 40%, at least about 45%, at least about 50%, at least about 55%, at least about 60%, at least about 65%, at least about 70%, at least about 75%, at least about 80%, at least about 85%, at least about 90%, at least about 95%, or at least about 99% of the monomers in the molecule are identical (exactly the same monomer) or are similar (conservative substitutions). The term “homologous” necessarily refers to a comparison between at least two sequences (polynucleotide or polypeptide sequences).

[0202] As used herein, the term “identity” refers to the overall monomer conservation between polymeric molecules, e.g., between polypeptide molecules or polynucleotide molecules (e.g. DNA molecules and/or RNA molecules). The term “identical” without any additional qualifiers, e.g., protein A is identical to protein B, implies the sequences are 100% identical (100% sequence identity). Describing two sequences as, e.g., “70% identical,” is equivalent to describing them as having, e.g., “70% sequence identity.”

[0203] Calculation of the percent identity of two polypeptide sequences, for example, can be performed by aligning the two sequences for optimal comparison purposes (e.g., gaps can be introduced in one or both of a first and a second polypeptide sequences for optimal alignment and non-identical sequences can be disregarded for comparison purposes). In certain aspects, the length of a sequence aligned for comparison purposes is at least 30%, at least 40%, at least 50%, at least 60%, at least 70%, at least 80%, at least 90%, at least 95%, or 100% of the length of the reference sequence. The amino acids at corresponding amino acid positions are then compared.

[0204] When a position in the first sequence is occupied by the same amino acid as the corresponding position in the second sequence, then the molecules are identical at that position. The percent identity between the two sequences is a function of the number of identical positions shared by the sequences, taking into account the number of gaps, and the length of each gap, which needs to be introduced for optimal alignment of the two sequences. The comparison of sequences and determination of percent identity between two sequences can be accomplished using a mathematical algorithm.

[0205] Suitable software programs are available from various sources, and for alignment of both protein and nucleotide sequences. One suitable program to determine percent sequence identity is bl2seq, part of the BLAST suite of program available from the U.S. government's National Center for Biotechnology Information BLAST web site (blast.ncbi.nlm.nih.gov). Bl2seq performs a comparison between two sequences using either the BLASTN or BLASTP algorithm. BLASTN is used to compare nucleic acid sequences, while BLASTP is used to compare amino acid sequences. Other suitable programs are, e.g., Needle, Stretcher, Water, or Matcher, part of the EMBOSS suite of bioinformatics programs and also available from the European Bioinformatics Institute (EBI) at www.ebi.ac.uk/Tools/psa.

[0206] Sequence alignments can be conducted using methods known in the art such as MAFFT, Clustal (ClustalW, Clustal X or Clustal Omega), MUSCLE, etc.

[0207] Different regions within a single polynucleotide or polypeptide target sequence that aligns with a polynucleotide or polypeptide reference sequence can each have their own percent sequence identity. It is noted that the percent sequence identity value is rounded to the nearest tenth. For example, 80.11, 80.12, 80.13, and 80.14 are rounded down to 80.1, while 80.15, 80.16, 80.17, 80.18, and 80.19 are rounded up to 80.2. It also is noted that the length value will always be an integer.

[0208] In certain aspects, the percentage identity (% ID) or of a first amino acid sequence (or nucleic acid sequence) to a second amino acid sequence (or nucleic acid sequence) is calculated as % ID=100×(Y/Z), where Y is the number of amino acid residues (or nucleobases) scored as identical matches in the alignment of the first and second sequences (as aligned by visual inspection or a particular sequence alignment program) and Z is the total number of residues in the second sequence. If the length of a first sequence is longer than the second sequence, the percent identity of the first sequence to the second sequence will be higher than the percent identity of the second sequence to the first sequence.

[0209] One skilled in the art will appreciate that the generation of a sequence alignment for the calculation of a percent sequence identity is not limited to binary sequence-sequence comparisons exclusively driven by primary sequence data. It will also be appreciated that sequence alignments can be generated by integrating sequence data with data from heterogeneous sources such as structural data (e.g., crystallographic protein structures), functional data (e.g., location of mutations), or phylogenetic data. A suitable program that integrates heterogeneous data to generate a multiple sequence alignment is T-Coffee, available at www.tcoffee.org, and alternatively available, e.g., from the EBI. It will also be appreciated that the final alignment used to calculate percent sequence identity can be curated either automatically or manually.

[0210] As used herein, the term “similarity” refers to the overall relatedness between polymeric molecules, e.g. between polynucleotide molecules (e.g. DNA molecules and/or RNA molecules) and/or between polypeptide molecules. Calculation of percent similarity of polymeric molecules to one another can be performed in the same manner as a calculation of percent identity, except that calculation of percent similarity takes into account conservative substitutions as is understood in the art. It is understood that percentage of similarity is contingent on the comparison scale used, i.e., whether the amino acids are compared, e.g., according to their evolutionary proximity, charge, volume, flexibility, polarity, hydrophobicity, aromaticity, isoelectric point, antigenicity, or combinations thereof.

[0211] As used herein, the terms “isolated,” “purified,” “extracted,” and grammatical variants thereof are used interchangeably and refer to the state of a preparation of desired composition of the present disclosure, e.g., a CAR of the present disclosure, that has undergone one or more processes of purification. In some aspects, isolating or purifying as used herein is the process of removing, partially removing (e.g., a fraction) of a composition of the present disclosure, e.g., a CAR of the present disclosure from a sample containing contaminants.

[0212] In some aspects, an isolated composition has no detectable undesired activity or, alternatively, the level or amount of the undesired activity is at or below an acceptable level or amount. In other aspects, an isolated composition has an amount and/or concentration of desired composition of the present disclosure, at or above an acceptable amount and/or concentration and/or activity. In other aspects, the isolated composition is enriched as compared to the starting material from which the composition is obtained. This enrichment can be by at least about 10%, at least about 15%, at least about 20%, at least about 25%, at least about 30%, at least about 35%, at least about 40%, at least about 45%, at least about 50%, at least about 55%, at least about 60%, at least about 65%, at least about 70%, at least about 75%, at least about 80%, at least about 85%, at least about 90%, at least about 95%, at least about 96%, at least about 97%, at least about 98%, at least about 99%, at least about 99.9%, at least about 99.99%, at least about 99.999%, at least about 99.9999%, or greater than 99.9999% as compared to the starting material.

[0213] In some aspects, isolated preparations are substantially free of residual biological products. In some aspects, the isolated preparations are 100% free, at least about 99% free, at least about 98% free, at least about 97% free, at least about 96% free, at least about 95% free, at least about 94% free, at least about 93% free, at least about 92% free, at least about 91% free, or at least about 90% free of any contaminating biological matter. Residual biological products can include abiotic materials (including chemicals) or unwanted nucleic acids, proteins, lipids, or metabolites.

[0214] “Nucleic acid,” “nucleic acid molecule,” “nucleotide sequence,” “polynucleotide,” and grammatical variants thereof are used interchangeably and refer to the phosphate ester polymeric form of ribonucleosides (adenosine, guanosine, uridine or cytidine; “RNA molecules”) or deoxyribonucleosides (deoxyadenosine, deoxyguanosine, deoxythymidine, or deoxycytidine; “DNA molecules”), or any phosphoester analogs thereof, such as phosphorothioates and thioesters, in either single stranded form, or a double-stranded helix. Single stranded nucleic acid sequences refer to single-stranded DNA (ssDNA) or single-stranded RNA (ssRNA). Double stranded DNA-DNA, DNA-RNA and RNA-RNA helices are possible. The term nucleic acid molecule, and in particular DNA or RNA molecule, refers only to the primary and secondary structure of the molecule, and does not limit it to any particular tertiary forms. Thus, this term includes double-stranded DNA found, inter alia, in linear or circular DNA molecules (e.g., restriction fragments), plasmids, supercoiled DNA and chromosomes. In discussing the structure of particular double-stranded DNA molecules, sequences can be described herein according to the normal convention of giving only the sequence in the 5′ to 3′ direction along the non-transcribed strand of DNA (i.e., the strand having a sequence homologous to the mRNA).

[0215] A “recombinant DNA molecule” is a DNA molecule that has undergone a molecular biological manipulation. DNA includes, but is not limited to, cDNA, genomic DNA, plasmid DNA, synthetic DNA, and semi-synthetic DNA. A “nucleic acid composition” of the disclosure comprises one or more nucleic acids as described herein.

[0216] The term “polynucleotide” as used herein refers to polymers of nucleotides of any length, including ribonucleotides, deoxyribonucleotides, analogs thereof, or mixtures thereof. This term refers to the primary structure of the molecule. Thus, the term includes triple-, double- and single-stranded deoxyribonucleic acid (“DNA”), as well as triple-, double- and single-stranded ribonucleic acid (“RNA”). It also includes modified, for example by alkylation, and/or by capping, and unmodified forms of the polynucleotide. More particularly, the term “polynucleotide” includes polydeoxyribonucleotides (containing 2-deoxy-D-ribose) and polyribonucleotides (containing D-ribose), including mRNA, whether spliced or unspliced, any other type of polynucleotide which is an N- or C-glycoside of a purine or pyrimidine base, and other polymers containing normucleotidic backbones, for example, polyamide (e.g., peptide nucleic acids “PNAs”) and polymorpholino polymers, and other synthetic sequence-specific nucleic acid polymers providing that the polymers contain nucleobases in a configuration which allows for base pairing and base stacking, such as is found in DNA and RNA.

[0217] In some aspects, a polynucleotide disclosed herein comprises a DNA, e.g., a DNA inserted in a vector. In other aspects, a polynucleotide disclosed herein comprises an mRNA. In some aspects, the mRNA is a synthetic mRNA. In some aspects, the synthetic mRNA comprises at least one unnatural nucleobase. In some aspects, all nucleobases of a certain class have been replaced with unnatural nucleobases (e.g., all uridines in a polynucleotide disclosed herein can be replaced with an unnatural nucleobase, e.g., 5-methoxyuridine).

[0218] The term “encoding” refers to the inherent property of specific sequences of nucleotides in a polynucleotide, such as a gene, a cDNA, or an mRNA, to serve as templates for synthesis of other polymers and macromolecules in biological processes having either a defined sequence of nucleotides (e.g., rRNA, tRNA and mRNA) or a defined sequence of amino acids and the biological properties resulting therefrom. Thus, a gene, cDNA, or RNA, encodes a protein if transcription and translation of mRNA corresponding to that gene produces the protein in a cell or other biological system. Both the coding strand, the nucleotide sequence of which is identical to the mRNA sequence and is usually provided in sequence listings, and the non-coding strand, used as the template for transcription of a gene or cDNA, can be referred to as encoding the protein or other product of that gene or cDNA.

[0219] Unless otherwise specified, a nucleotide sequence “encoding” an amino acid sequence,” e.g., a polynucleotide “encoding” a CAR of the present disclosure, includes all nucleotide sequences that are degenerate versions of each other and that encode the same amino acid sequence.

[0220] The term “expression” refers to the transcription and/or translation of a particular nucleotide sequence driven by a promoter.

[0221] The terms “polypeptide,” “peptide,” and “protein” are used interchangeably herein to refer to polymers of amino acids of any length. The polymer can comprise modified amino acids. The terms also encompass an amino acid polymer that has been modified naturally or by intervention; for example, disulfide bond formation, glycosylation, lipidation, acetylation, phosphorylation, or any other manipulation or modification, such as conjugation with a labeling component. Also included within the definition are, for example, polypeptides containing one or more analogs of an amino acid (including, for example, unnatural amino acids such as homocysteine, ornithine, p-acetylphenylalanine, D-amino acids, and creatine), as well as other modifications known in the art.

[0222] The term “polypeptide,” as used herein, refers to proteins, polypeptides, and peptides of any size, structure, or function. Polypeptides include gene products, naturally occurring polypeptides, synthetic polypeptides, homologs, orthologs, paralogs, fragments and other equivalents, variants, and analogs of the foregoing. A polypeptide can be a single polypeptide or can be a multi-molecular complex such as a dimer, trimer or tetramer. They can also comprise single chain or multichain polypeptides. Most commonly disulfide linkages are found in multichain polypeptides. The term polypeptide can also apply to amino acid polymers in which one or more amino acid residues are an artificial chemical analogue of a corresponding naturally occurring amino acid. In some aspects, a “peptide” can be less than or equal to 50 amino acids long, e.g., about 5, 10, 15, 20, 25, 30, 35, 40, 45, or 50 amino acids long.

[0223] A “recombinant” polypeptide or protein refers to a polypeptide or protein produced via recombinant DNA technology. Recombinantly produced polypeptides and proteins expressed in engineered host cells are considered isolated for the purpose of the disclosure, as are native or recombinant polypeptides which have been separated, fractionated, or partially or substantially purified by any suitable technique. The polypeptides disclosed herein can be recombinantly produced using methods known in the art. In some aspects, the CARs of the present disclosure are recombinantly produced. In some aspects, the CARs of the present disclosure are produced by cells, e.g., T cells, following transfection with at least one polynucleotide o vector encoding a CAR of the present disclosure.

[0224] As used herein, the term “fragment” of a polypeptide (e.g., a Ig hinge) refers to an amino acid sequence of a polypeptide that is shorter than the naturally-occurring sequence, N- and/or C-terminally deleted or any part of the polypeptide deleted in comparison to the naturally occurring polypeptide. Thus, a fragment does not necessary need to have only N- and/or C-terminal amino acids deleted. A polypeptide in which internal amino acids have been deleted with respect to the naturally occurring sequence is also considered a fragment.

[0225] As used herein, the term “functional fragment” refers to a polypeptide fragment that retains polypeptide function. Accordingly, in some aspects, a functional fragment of an Ig hinge, retains the ability to position an antigen-binding domain (e.g., an scFv) in a CAR at a distance from a target epitope (e.g., a tumor antigen) such that the antigen-binding domain (e.g., an scFv) can effectively interact with the target epitope (e.g., a tumor antigen).

[0226] Whether a Ig hinge fragment is a functional fragment can be assessed by any art known methods to determine the binding of the CAR comprising the spacer to a target antigen, and T-cell activation, including, e.g., Western Blots, FACS analysis, cytokine secretion analyses, cell survival analyses, etc. In certain aspects, a Ig hinge functional fragment is a fragment that when used as a spacer in a CAR, results in a CAR with, e.g., at least about 20%, at least about 25%, at least about 30%, at least about 35%, at least about 40%, at least about 45%, at least about 50%, at least 55%, at least about 60%, at least about 65%, at least about 70%, at least about 75%, at least about 80%, at least about 85%, at least about 90%, at least about 95%, at least about 99%, or about 100% of the activity of a reference CAR. As used herein, the term “reference CAR” refers to a corresponding CAR comprising the same structural components as the tested CAR, but a different spacer (a “reference spacer”). In some aspects, the reference spacer is, e.g., an IgG1 spacer, i.e., a spacer corresponding to the hinge regions of IgG1.

[0227] Using known methods of protein engineering and recombinant DNA technology, variants can be generated to improve or alter the characteristics of the polypeptides. For instance, one or more amino acids can be deleted from the N-terminus or C-terminus of the secreted protein without substantial loss of biological function. Ron et al., J. Biol. Chem. 268: 2984-2988 (1993), incorporated herein by reference in its entirety, reported variant KGF proteins having heparin binding activity even after deleting 3, 8, or 27 amino-terminal amino acid residues. Similarly, interferon gamma exhibited up to ten times higher activity after deleting 8-10 amino acid residues from the carboxy terminus of this protein. (Dobeli et al., J. Biotechnology 7:199-216 (1988), incorporated herein by reference in its entirety.)

[0228] Moreover, ample evidence demonstrates that variants often retain a biological activity similar to that of the naturally occurring protein. For example, Gayle and coworkers (J. Biol. Chem 268:22105-22111 (1993), incorporated herein by reference in its entirety) conducted extensive mutational analysis of human cytokine IL-1a. They used random mutagenesis to generate over 3,500 individual IL-1a mutants that averaged 2.5 amino acid changes per variant over the entire length of the molecule. Multiple mutations were examined at every possible amino acid position. The investigators found that “[m]ost of the molecule could be altered with little effect on either [binding or biological activity].” (See Abstract.) In fact, only 23 unique amino acid sequences, out of more than 3,500 nucleotide sequences examined, produced a protein that significantly differed in activity from wild-type.

[0229] As stated above, variants or derivatives include, e.g., modified polypeptides. In some aspects, variants or derivatives of, e.g., polypeptides, polynucleotides, lipids, glycoproteins, are the result of chemical modification and/or endogenous modification. In some aspects, variants or derivatives are the result of in vivo modification. In some aspects, variants or derivatives are the result of in vitro modification. In yet other aspects, variant or derivatives are the result of intracellular modification in producer cells, e.g., T cells.

[0230] Modifications present in variants and derivatives include, e.g., acetylation, acylation, ADP-ribosylation, amidation, covalent attachment of flavin, covalent attachment of a heme moiety, covalent attachment of a nucleotide or nucleotide derivative, covalent attachment of a lipid or lipid derivative, covalent attachment of phosphotidylinositol, cross-linking, cyclization, disulfide bond formation, demethylation, formation of covalent cross-links, formation of cysteine, formation of pyroglutamate, formylation, gamma-carboxylation, glycosylation, GPI anchor formation, hydroxylation, iodination, methylation, myristoylation, oxidation, pegylation (Mei et al., Blood 116:270-79 (2010), which is incorporated herein by reference in its entirety), proteolytic processing, phosphorylation, prenylation, racemization, selenoylation, sulfation, transfer-RNA mediated addition of amino acids to proteins such as arginylation, and ubiquitination.

[0231] The term “signaling domain” refers to the functional portion of a protein which acts by transmitting information within the cell to regulate cellular activity via defined signaling pathways by generating second messengers or functioning as effectors by responding to such messengers.

[0232] An “intracellular signaling domain,” as the term is used herein, refers to an intracellular portion of a molecule. The intracellular signaling domain can generate a signal that promotes an immune effector function of the CAR containing cell, e.g., a CART cell. Examples of immune effector function, e.g., in a CART cell, include cytolytic activity and helper activity, including the secretion of cytokines. In some aspects, the intracellular signal domain is the portion of the protein which transduces the effector function signal and directs the cell to perform a specialized function. While the entire intracellular signaling domain can be employed, in many cases it is not necessary to use the entire chain. To the extent that a truncated portion of the intracellular signaling domain is used, such truncated portion can be used in place of the intact chain as long as it transduces the effector function signal. The term intracellular signaling domain is thus meant to include any truncated portion of the intracellular signaling domain sufficient to transduce the effector function signal.

[0233] In an embodiment, the intracellular signaling domain can comprise a primary intracellular signaling domain. Exemplary primary intracellular signaling domains include those derived from the molecules responsible for primary stimulation, or antigen dependent simulation. In an embodiment, the intracellular signaling domain can comprise a costimulatory intracellular domain. Exemplary costimulatory intracellular signaling domains include those derived from molecules responsible for costimulatory signals, or antigen independent stimulation. For example, in the case of a CAR T, a primary intracellular signaling domain can comprise a cytoplasmic sequence of a T cell receptor, and a costimulatory intracellular signaling domain can comprise cytoplasmic sequence from co-receptor or costimulatory molecule.

[0234] A primary intracellular signaling domain can comprise a signaling motif which is known as an immunoreceptor tyrosine-based activation motif or ITAM. Examples of ITAM containing primary cytoplasmic signaling sequences include, but are not limited to, those derived from CD3 zeta, FcR gamma, common FcR gamma (FCER1G), Fc gamma RIIa, FcR beta (Fc Epsilon Rib), CD3 gamma, CD3 delta, CD3 epsilon, CD22, CD79a, CD79b, CD278 (ICOS), FccRI, CD66d, CD32, DAP10 and DAP12.

[0235] The terms “covalently linked,” “fused,” and grammatical variants thereof are used interchangeably and refer to a first moiety, e.g., a first amino acid sequence or nucleotide sequence, covalently or non-covalently joined to a second moiety, e.g., a second amino acid sequence or nucleotide sequence, respectively. The first moiety can be directly joined or juxtaposed to the second moiety or alternatively an intervening moiety can covalently join the first moiety to the second moiety. The term “linked” means not only a fusion of a first moiety to a second moiety at the C-terminus or the N-terminus, but also includes insertion of the whole first moiety (or the second moiety) into any two points, e.g., amino acids, in the second moiety (or the first moiety, respectively). In some aspects, the first moiety is linked to a second moiety by a peptide bond or a linker. The first moiety can be linked to a second moiety by a phosphodiester bond or a linker. The linker can be a peptide or a polypeptide (for polypeptide chains) or a nucleotide or a nucleotide chain (for nucleotide chains) or any chemical moiety (for polypeptide or polynucleotide chains or any chemical molecules).

[0236] As used herein, the term “pharmaceutical composition” refers to one or more of the compounds described herein, such as, e.g., a CAR of the present disclosure or a cell expressing a CAR of the present disclosure, mixed or intermingled with, or suspended in one or more other chemical components, such as pharmaceutically-acceptable carriers and excipients. One purpose of a pharmaceutical composition is to facilitate administration of preparations of, e.g., cell expressing a CAR of the present disclosure to a subject.

[0237] The terms “excipient” and “carrier” are used interchangeably and refer to an inert substance added to a pharmaceutical composition to further facilitate administration of a compound, e.g., a CAR of the present disclosure.

[0238] The terms “pharmaceutically-acceptable carrier,” “pharmaceutically-acceptable excipient,” and grammatical variations thereof, encompass any of the agents approved by a regulatory agency of the U.S. Federal government or listed in the U.S. Pharmacopeia for use in animals, including humans, as well as any carrier or diluent that does not cause the production of undesirable physiological effects to a degree that prohibits administration of the composition to a subject and does not abrogate the biological activity and properties of the administered compound. Included are excipients and carriers that are useful in preparing a pharmaceutical composition and are generally safe, non-toxic, and desirable.

[0239] The terms “subject,” “patient,” “individual,” and “host,” and variants thereof are used interchangeably herein and refer to any mammalian subject, including without limitation, humans, domestic animals (e.g., dogs, cats and the like), farm animals (e.g., cows, sheep, pigs, horses and the like), and laboratory animals (e.g., monkey, rats, mice, rabbits, guinea pigs and the like) for whom diagnosis, treatment, or therapy is desired, particularly humans. The methods described herein are applicable to both human therapy and veterinary applications.

[0240] As used herein, the phrase “subject in need thereof” includes subjects, such as mammalian subjects, that would benefit from administration of a CAR of the present disclosure, e.g., to improve hemostasis.

[0241] The terms “treat,” “treatment,” or “treating,” as used herein refers to, e.g., the reduction in severity of a disease or condition; the reduction in the duration of a disease course; the amelioration or elimination of one or more symptoms associated with a disease or condition; the provision of beneficial effects to a subject with a disease or condition, without necessarily curing the disease or condition. The term also include prophylaxis or prevention of a disease or condition or its symptoms thereof. In some aspects, the term “treating” or “treatment” means inducing an immune response in a subject against an antigen.

[0242] The terms “prevent,” “preventing,” and variants thereof as used herein, refer partially or completely delaying onset of an disease, disorder and/or condition; partially or completely delaying onset of one or more symptoms, features, or clinical manifestations of a particular disease, disorder, and/or condition; partially or completely delaying onset of one or more symptoms, features, or manifestations of a particular disease, disorder, and/or condition; partially or completely delaying progression from a particular disease, disorder and/or condition; and/or decreasing the risk of developing pathology associated with the disease, disorder, and/or condition. In some aspects, preventing an outcome is achieved through prophylactic treatment.

[0243] As used herein the term “therapeutically effective amount” is the amount of reagent or pharmaceutical compound comprising a CAR of the present disclosure that is sufficient to a produce a desired therapeutic effect, pharmacologic and/or physiologic effect on a subject in need thereof.

[0244] A therapeutically effective amount can be a “prophylactically effective amount” as prophylaxis can be considered therapy. As used herein, “prophylactic” refers to a therapeutic or course of action used to prevent the onset of a disease or condition, or to prevent or delay a symptom associated with a disease or condition. As used herein, a “prophylaxis” refers to a measure taken to maintain health and prevent the onset of a disease or condition, or to prevent or delay a symptom associated with a disease or condition.

II. CARs with Ig Derived Spacers

[0245] The present disclosure provides Immunoglobulin (Ig) derived CAR spacers (e.g., derived from hinge regions or loop regions) that are useful for cells expressing one or more chimeric antigen receptors. These CAR spacers comprise, e.g., IgA1, IgA2, IgG1, IgG2, IgG3, IgG4, IgD, IgE, or IgM hinge regions, fragments thereof (alone or capped by additional sequences, e.g., CH1 or CH2 regions sequences), or combinations of fragments from IgA1, IgA2, IgG1, IgG2, IgG3, IgG4, IgD, IgE, or IgM hinge regions. In some aspects, the CAR spacers comprise, e.g., IgA1, IgA2, IgG1, IgG2, IgG3, IgG4, IgD, IgE, or IgM constant domain loop regions, fragments thereof (alone or capped by additional sequences, e.g., from adjacent β-strands), or combinations of fragments from IgA1, IgA2, IgG1, IgG2, IgG3, IgG4, IgD, IgE, or IgM loop regions. In some aspects, the CAR spacer of the present disclosure comprise hinge region derived sequences, loop region derived sequences, or combinations thereof.

[0246] Accordingly, the present disclosures provide polynucleotides encoding a CAR comprising, e.g., (i) an antigen-binding domain, (ii) a transmembrane domain, (iii) an intracellular domain, and (iv) a CAR spacer comprising an amino acid sequence derived from a human immunoglobulin (Ig) hinge region and/or loop region (i.e., a CAR spacer of the present disclosure), and optionally a linker (e.g, a gly-ser rich linker) wherein the spacer is located between the antigen-binding domain and the transmembrane domain. In some aspects, the present disclosure provides a recombinant nucleic acid construct comprising a transgene encoding a CAR of the present disclosure. The present disclosure also provides a CAR encoded by one or more of the polynucleotide sequences or the vectors disclosed herein. In some aspects, the CAR of present disclosure is designed as a standard CAR, a split CAR, an off-switch CAR, an on-switch CAR, a first-generation CAR, a second-generation CAR, a third-generation CAR, a fourth-generation CAR, or a fifth generation CAR.

[0247] The term “CAR spacer” as used herein refers to a polypeptide sequence which is capable of covalently linking together two spaced moieties: an antigen-binding domain, and the transmembrane domain of the CAR.

[0248] The terms “CAR spacer of the present disclosure” and “Ig derived CAR spacer” are used interchangeably to refers to
[0249] (i) a “hinge region derived CAR spacer,” i.e., a CAR spacer comprising an amino acid sequence derived from a hinge region located between the CH1 and CH2 constant domains of a human immunoglobulin, e.g., IgA1, IgA2, IgG1, IgG2, IgG3, IgG4, IgD, IgE, or IgM, and optionally one or more amino acids from an adjacent CH1 and/or CH2 domain, or a combination thereof (e.g., several concatenated hinge region derived CAR spacer);
[0250] (ii) a “loop region derived CAR spacer,” i.e., a CAR spacer comprising an amino acid sequence derived from a loop region of a constant domain of a human immunoglobulin, e.g., IgA1, IgA2, IgG1, IgG2, IgG3, IgG4, IgD, IgE, or IgM, and optionally one or more amino acids from an adjacent β-strand, or a combination thereof (e.g., several concatenated loop region derived CAR spacers); or,
[0251] (iii) a combination thereof (e.g., two or more concatenated hinge region derived CAR spacers and loop region derived CAR spacers).

[0252] In some aspects, the term CAR spacer of the present disclosure refers to a subsequence of an immunoglobulin heavy chain selected the group consisting of human IgA1 (Uniprot: P01876, IGHA1_HUMAN, immunoglobulin heavy constant alpha 1; SEQ ID NO: 4994), human IgA2 (Uniprot P01877, IGHA2_HUMAN, immunoglobulin heavy constant alpha 2; SEQ ID NO: 4995), murine IgG2A (Uniprot P01665, GCAM_MOUSE, immunoglobulin gamma 2A chain C region; SEQ ID NO: 4993), human IgG1 (Uniprot P01857, IGHG1_HUMAN, immunoglobulin heavy constant gamma 1; SEQ ID NO: 4998), human IgG2 (Uniprot P01859, IGHG2_HUMAN, immunoglobulin heavy constant gamma 2; SEQ ID NO: 4999), human IgG3 (Uniprot P01860, IGHG3_HUMAN, immunoglobulin heavy constant gamma 3; SEQ ID NO: 5000), human IgG4 (Uniprot P01861, IGHG4, immunoglobulin heavy constant gamma 4; SEQ ID NO: 5001), human IgD (Uniprot P01880, IGHD_HUMAN, immunoglobulin heavy constant delta; SEQ ID NO: 4996), human IgE (Uniprot P01854, IGHE_HUMAN, immunoglobulin heavy constant chain epsilon; SEQ ID NO: 4997), or IgM (Uniprot P01871, IGHM_HUMAN, immunoglobulin heavy constant mu; SEQ ID NO: 5002), wherein the subsequence comprises the CH1-CH2 hinge region or a portion thereof. In some aspects, the subsequence further comprises an adjacent portion of a CH1 and/or CH2 constant domain.

[0253] In some aspects, the term CAR spacer of the present disclosure refers to a subsequence of an immunoglobulin heavy chain selected the group consisting of human IgA1 (Uniprot: P01876, IGHA1_HUMAN, immunoglobulin heavy constant alpha 1; SEQ ID NO: 4994), human IgA2 (Uniprot P01877, IGHA2_HUMAN, immunoglobulin heavy constant alpha 2; SEQ ID NO: 4995), murine IgG2A (Uniprot P01665, GCAM_MOUSE, immunoglobulin gamma 2A chain C region; SEQ ID NO: 4993), human IgG1 (Uniprot P01857, IGHG1_HUMAN, immunoglobulin heavy constant gamma 1; SEQ ID NO: 4998), human IgG2 (Uniprot P01859, IGHG2_HUMAN, immunoglobulin heavy constant gamma 2; SEQ ID NO: 4999), human IgG3 (Uniprot P01860, IGHG3_HUMAN, immunoglobulin heavy constant gamma 3; SEQ ID NO: 5000), human IgG4 (Uniprot P01861, IGHG4, immunoglobulin heavy constant gamma 4; SEQ ID NO: 5001), human IgD (Uniprot P01880, IGHD_HUMAN, immunoglobulin heavy constant delta; SEQ ID NO: 4996), human IgE (Uniprot P01854, IGHE_HUMAN, immunoglobulin heavy constant chain epsilon; SEQ ID NO: 4997), or IgM (Uniprot P01871, IGHM_HUMAN, immunoglobulin heavy constant mu; SEQ ID NO: 5002), wherein the subsequence comprises a loop region from a constant domain or a portion thereof. In some aspects, the subsequence further comprises an adjacent portion of a β-strand.

[0254] In some aspects, the CAR spacer comprises a subsequence consisting of 4, 5, 6, 7, 8, 9, 10, 11, 12, 13, 14, 15, 16, 17, 18, 19, 20, 21, 22, 23, 24, 25, 26, 27, 28, 29, 30, 31, 32, 33, 34, 35, 36, 37, 38, 39, 40, 41, 42, 43, 44, 45, 46, 47, 48, 49, 50, 51, 52, 53, 54, 55, 56, 57, 58, 59, 60, 61, 62, 63, 64, 65, 66, 67, 68, 69, 70, 71, 72, 73, 74, 75, 76, 77, 78, 79, or 80 amino acids from a hinge region of an immunoglobulin of SEQ ID NO: 4993-5002; or a combination thereof.

[0255] In some aspects, the CAR spacer comprises a subsequence consisting of 4, 5, 6, 7, 8, 9, 10, 11, 12, 13, 14, 15, 16, 17, 18, 19, 20, 21, 22, 23, 24, 25, 26, 27, 28, 29, 30, 31, 32, 33, 34, 35, 36, 37, 38, 39, 40, 41, 42, 43, 44, 45, 46, 47, 48, 49, 50, 51, 52, 53, 54, 55, 56, 57, 58, 59, 60, 61, 62, 63, 64, 65, 66, 67, 68, 69, 70, 71, 72, 73, 74, 75, 76, 77, 78, 79, or 80 amino acids from a hinge region of an immunoglobulin of SEQ ID NO: 4993-5002, wherein the subsequence further comprises 1, 2, 3, 4, 5, 6, 7, 8, 9, or 10 contiguous amino acids from the CH1 region adjacent to the hinge region subsequence; or a combination thereof.

[0256] In some aspects, the CAR spacer comprises a subsequence consisting of 4, 5, 6, 7, 8, 9, 10, 11, 12, 13, 14, 15, 16, 17, 18, 19, 20, 21, 22, 23, 24, 25, 26, 27, 28, 29, 30, 31, 32, 33, 34, 35, 36, 37, 38, 39, 40, 41, 42, 43, 44, 45, 46, 47, 48, 49, 50, 51, 52, 53, 54, 55, 56, 57, 58, 59, 60, 61, 62, 63, 64, 65, 66, 67, 68, 69, 70, 71, 72, 73, 74, 75, 76, 77, 78, 79, or 80 amino acids from a hinge region of an immunoglobulin of SEQ ID NO: 4993-5002, wherein the subsequence further comprises 1, 2, 3, 4, 5, 6, 7, 8, 9, or 10 contiguous amino acids from the CH2 region adjacent to the hinge region subsequence; or a combination thereof.

[0257] In some aspects, the CAR spacer comprises a subsequence consisting of 4, 5, 6, 7, 8, 9, 10, 11, 12, 13, 14, 15, 16, 17, 18, 19, 20, 21, 22, 23, 24, 25, 26, 27, 28, 29, 30, 31, 32, 33, 34, 35, 36, 37, 38, 39, 40, 41, 42, 43, 44, 45, 46, 47, 48, 49, 50, 51, 52, 53, 54, 55, 56, 57, 58, 59, 60, 61, 62, 63, 64, 65, 66, 67, 68, 69, 70, 71, 72, 73, 74, 75, 76, 77, 78, 79, or 80 amino acids from a hinge region of an immunoglobulin of SEQ ID NO: 4993-5002, wherein the subsequence further comprises 1, 2, 3, 4, 5, 6, 7, 8, 9, or 10 contiguous amino acids from the CH1 region adjacent to the hinge region subsequence and 1, 2, 3, 4, 5, 6, 7, 8, 9, or 10 contiguous amino acids from the CH2 region adjacent to the hinge region subsequence; or a combination thereof.

[0258] In some aspects, the CAR spacer comprises a hinge region derived spacer and further comprises a glycine-serine flexible linker, e.g., a Gly-Ser of SEQ ID NO: 4818 or 5088.

[0259] In some aspects, the CAR spacer comprises a subsequence consisting of 4, 5, 6, 7, 8, 9, 10, 11, 12, 13, 14, 15, 16, 17, 18, 19, 20, 21, 22, 23, 24, 25, 26, 27, 28, 29, 30, 31, 32, 33, 34, 35, 36, 37, 38, 39, 40, 41, 42, 43, 44, 45, 46, 47, 48, 49, 50, 51, 52, 53, 54, 55, 56, 57, 58, 59, 60, 61, 62, 63, 64, 65, 66, 67, 68, 69, 70, 71, 72, 73, 74, 75, 76, 77, 78, 79, or 80 amino acids from a loop region of a constant domain (e.g., CH1, CH2 or CH3) of an immunoglobulin of SEQ ID NO: 4993-5002; or a combination thereof.

[0260] In some aspects, the CAR spacer comprises a subsequence consisting of 4, 5, 6, 7, 8, 9, 10, 11, 12, 13, 14, 15, 16, 17, 18, 19, 20, 21, 22, 23, 24, 25, 26, 27, 28, 29, 30, 31, 32, 33, 34, 35, 36, 37, 38, 39, 40, 41, 42, 43, 44, 45, 46, 47, 48, 49, 50, 51, 52, 53, 54, 55, 56, 57, 58, 59, 60, 61, 62, 63, 64, 65, 66, 67, 68, 69, 70, 71, 72, 73, 74, 75, 76, 77, 78, 79, or 80 amino acids from a loop region of a constant domain (e.g., CH1, CH2 or CH3) of an immunoglobulin of SEQ ID NO: 4993-5002, wherein the subsequence further comprises 1, 2, 3, 4, 5, 6, 7, 8, 9, or 10 contiguous amino acids from a β-strand adjacent to the C-terminus of the loop region subsequence; or a combination thereof.

[0261] In some aspects, the CAR spacer comprises a subsequence consisting of 4, 5, 6, 7, 8, 9, 10, 11, 12, 13, 14, 15, 16, 17, 18, 19, 20, 21, 22, 23, 24, 25, 26, 27, 28, 29, 30, 31, 32, 33, 34, 35, 36, 37, 38, 39, 40, 41, 42, 43, 44, 45, 46, 47, 48, 49, 50, 51, 52, 53, 54, 55, 56, 57, 58, 59, 60, 61, 62, 63, 64, 65, 66, 67, 68, 69, 70, 71, 72, 73, 74, 75, 76, 77, 78, 79, or 80 amino acids from a loop region of a constant domain (e.g., CH1, CH2 or CH3) of an immunoglobulin of SEQ ID NO: 4993-5002, wherein the subsequence further comprises 1, 2, 3, 4, 5, 6, 7, 8, 9, or 10 contiguous amino acids from a β-strand adjacent to the N-terminus of the loop region subsequence; or a combination thereof.

[0262] In some aspects, the CAR spacer comprises a subsequence consisting of 4, 5, 6, 7, 8, 9, 10, 11, 12, 13, 14, 15, 16, 17, 18, 19, 20, 21, 22, 23, 24, 25, 26, 27, 28, 29, 30, 31, 32, 33, 34, 35, 36, 37, 38, 39, 40, 41, 42, 43, 44, 45, 46, 47, 48, 49, 50, 51, 52, 53, 54, 55, 56, 57, 58, 59, 60, 61, 62, 63, 64, 65, 66, 67, 68, 69, 70, 71, 72, 73, 74, 75, 76, 77, 78, 79, or 80 amino acids from a loop region of a constant domain (e.g., CH1, CH2 or CH3) of an immunoglobulin of SEQ ID NO: 4993-5002, wherein the subsequence further comprises 1, 2, 3, 4, 5, 6, 7, 8, 9, or 10 contiguous amino acids from a β-strand adjacent to the C-terminus of the loop region subsequence; and 1, 2, 3, 4, 5, 6, 7, 8, 9, or 10 contiguous amino acids from the a β-strand adjacent to N-terminus of the loop region subsequence.

[0263] In some aspects, the CAR spacer comprises a loop region derived spacer and further comprises a glycine-serine flexible linker, e.g., a Gly-Ser of SEQ ID NO: 4818 or 5088.

[0264] In some aspects, a CAR spacer derived from a hinge region disclosed herein comprises, consists, or consist essentially of an amino acid sequence of having at least about 70%, at least about 75%, at least about 80%, at least about 85%, at least about 90%, at least about 95%, at least about 96%, at least about 97%, at least about 98%, at least about 99%, or about 100% sequence identity to a sequence selected from the group consisting of SEQ ID NOS: 4830-4842, and 4844-4859.

[0265] In some aspects, a CAR spacer derived from a loop region disclosed herein comprises, consists, or consist essentially of an amino acid sequence having at least about 70%, at least about 75%, at least about 80%, at least about 85%, at least about 90%, at least about 95%, at least about 96%, at least about 97%, at least about 98%, at least about 99%, or about 100% sequence identity to the sequence set forth in SEQ ID NO: 4843 (Spacer 15).

### II.A. IgD Derived CAR Spacer

[0266] Immunoglobulin D (IgD) is an antibody isotype that makes up about 1% of proteins in the plasma membranes of immature B-lymphocytes where it is usually co-expressed with another cell surface antibody called IgM. Structurally, IgD are similar to IgG.

[0267] As used herein, the term “IgD hinge” refers to an amino sequence located between the CH1 region and CH2 regions of the heavy chain of a IgD. IgD heavy chains contain a long hinge region encoded by two exons located between amino acid positions 99 and 162. One exon encodes hinge subregion 1 (SEQ ID NO: 861) and the second exon encodes hinge subregion 2 (SEQ ID NO: 1287). In some aspects, of the present disclosure, the “IgD hinge” is an extended IgD comprising, i.e., a sequence comprising the 64 amino acids IgD hinge core (subregions 1 and 2) plus a 13 amino acids long C-terminal CH2 fragment of SEQ ID NO:2143. Thus, a “full length IgD hinge” as defined in the present application comprises the 77 amino acids long sequence of SEQ ID NO: 1.

[0268] As used herein, the term “IgD hinge derived CAR spacer” comprises, e.g., spacer comprising IgD hinge subregion 1 and fragments thereof, IgD hinge subregion 2 and fragments thereof, fragments of a full length IgD hinge of SEQ ID NO: 1, and variants thereof comprising 1, 2, 3, 4, 5 or more CH1 region and/or CH2 region amino acids.

[0269] In some aspects, an IgD hinge derived CAR spacer of the present disclosure comprises at least five, six, or seven consecutive amino acids of SEQ ID NO: 1. In some aspects, the IgD hinge derived spacer comprises at least five, six, or seven consecutive amino acids of SEQ ID NO: 861, SEQ ID NO: 1287, and/or SEQ ID ON: 2143.

[0270] In some aspects, a CAR comprising an IgD hinge derived spacer is capable of inducing an increased Interferon-γ level, e.g., at least 10%, at least about 20%, at least about 30%, at least about 40%, at least about 50%, at least about 60%, at least about 70%, at least about 80%, at least about 90%, at least about 100%, at least about 120%, at least about 150%, compared to a CAR comprising a reference spacer, e.g., a reference IgG4 spacer (e.g., a spacer of SEQ ID NO: 4911).

[0271] In some aspects, a CAR comprising an IgD hinge derived spacer is capable of inducing an increased Interleukin-2 level, e.g., at least 10%, at least about 20%, at least about 30%, at least about 40%, at least about 50%, at least about 60%, at least about 70%, at least about 80%, at least about 90%, at least about 100%, at least about 120%, at least about 150%, compared to a CAR comprising a reference spacer, e.g., a reference IgG4 spacer (e.g., a spacer of SEQ ID NO: 4911). As used herein, the term “reference spacer” refers to a spacer present in a CAR prior to being optimized by the replacement of the original spacer with a spacer disclosed herein. In some aspects, the reference spacer is an IgG4 spacer (e.g., a spacer of SEQ ID NO: 4911). In some aspects, the reference spacer can be any spacer known in the art, e.g., a spacer disclosed in any of the documents incorporated by reference in the present disclosure.

[0272] In some aspects, a CAR comprising an IgD hinge derived spacer is capable of inducing an increased TNF-α level, e.g., at least 10%, at least about 20%, at least about 30%, at least about 40%, at least about 50%, at least about 60%, at least about 70%, at least about 80%, at least about 90%, at least about 100%, at least about 120%, at least about 150%, compared to a CAR comprising a reference spacer, e.g., a reference IgG4 spacer (e.g., a spacer of SEQ ID NO: 4911).

[0273] In some aspects, an IgD hinge derived CAR spacer of the present disclosure comprises an amino acid sequence having at least about 70%, at least about 75%, at least about 80%, at least about 85%, at least about 90%, at least about 95%, at least about 96%, at least about 97%, at least about 98%, at least about 99%, or about 100% sequence identity to the sequence set forth in SEQ ID NO: 1. In some aspects, the IgD hinge derived spacer comprises an amino acid sequence having at least about 70%, at least about 75%, at least about 80%, at least about 85%, at least about 90%, at least about 95%, at least about 96%, at least about 97%, at least about 98%, at least about 99%, or about 100% sequence identity to SEQ ID NO: 861, SEQ ID NO: 1287, and/or SEQ ID ON: 2143.

[0274] In some aspects, an IgD hinge derived CAR spacer of the present disclosure comprises, consists, or consist essentially of a sequence disclosed in TABLE 1.

TABLE 1
IgD derived spacers. SEQ ID NO: 1 is full length IgD hinge.

| Length | SEQ ID | Length | SEQ ID | Length | SEQ ID |
|---|---|---|---|---|---|
| 77 (full length) | 1 | 76 | 2-3 | 75 | 4-6 |
| 74 | 7-10 | 73 | 11-15 | 72 | 16-21 |
| 71 | 22-28 | 70 | 29-36 | 69 | 37-45 |
| 68 | 46-55 | 67 | 56-66 | 66 | 67-78 |
| 65 | 79-91 | 64 | 92-105 | 63 | 106-120 |
| 62 | 121-136 | 61 | 137-153 | 60 | 154-171 |
| 59 | 172-190 | 58 | 191-210 | 57 | 211-231 |
| 56 | 232-253 | 55 | 254-276 | 54 | 277-300 |
| 53 | 301-325 | 52 | 326-351 | 51 | 352-378 |
| 50 | 379-406 | 49 | 407-435 | 48 | 436-465 |
| 47 | 466-496 | 46 | 497-528 | 45 | 529-561 |
| 44 | 562-595 | 43 | 596-630 | 42 | 631-666 |
| 41 | 667-703 | 40 | 704-741 | 39 | 742-780 |
| 38 | 781-820 | 37 | 821-861 | 36 | 862-903 |
| 35 | 904-946 | 34 | 947-989 | 33 | 990-1034 |
| 32 | 1035-1080 | 31 | 1081-1126 | 30 | 1127-1174 |
| 29 | 1175-1223 | 28 | 1124-1273 | 27 | 1274-1324 |
| 26 | 1325-1376 | 25 | 1377-1429 | 24 | 1430-1483 |
| 23 | 1484-1538 | 22 | 1539-1594 | 21 | 1595-1651 |
| 20 | 1652-1709 | 19 | 1710-1768 | 18 | 1769-1828 |
| 17 | 1829-1889 | 16 | 1980-1951 | 15 | 1952-2014 |
| 14 | 2015-2078 | 13 | 2079-2043 | 12 | 2144-2209 |
| 11 | 2210-2276 | 10 | 2277-2344 | 9 | 2345-2413 |
| 8 | 2414-2473 | 7 | 2484-2559 | | |

[0275] In some aspects, the spacer comprises an amino acid sequence having at least about 70%, at least about 75%, at least about 80%, at least about 85%, at least about 90%, at least about 95%, at least about 96%, at least about 97%, at least about 98%, at least about 99%, or about 100% sequence identity to a sequence selected from the group consisting of SEQ ID NO: 2015; SEQ ID NO: 1889; SEQ ID NO: 1768; SEQ ID NO: 1; and any combination thereof.

[0276] In some aspects, the spacer comprises an amino acid sequence having at least about 70%, at least about 75%, at least about 80%, at least about 85%, at least about 90%, at least about 95%, at least about 96%, at least about 97%, at least about 98%, at least about 99%, or about 100% sequence identity to the sequence set forth in SEQ ID NO: 2015.

[0277] In some aspects, the spacer comprises an amino acid sequence having at least about 70%, at least about 75%, at least about 80%, at least about 85%, at least about 90%, at least about 95%, at least about 96%, at least about 97%, at least about 98%, at least about 99%, or about 100% sequence identity to the sequence set forth in SEQ ID NO: 1889.

[0278] In some aspects, the spacer comprises an amino acid sequence having at least about 70%, at least about 75%, at least about 80%, at least about 85%, at least about 90%, at least about 95%, at least about 96%, at least about 97%, at least about 98%, at least about 99%, or about 100% sequence identity to the sequence set forth in SEQ ID NO: 1.

[0279] In some aspects, the spacer comprises an amino acid sequence having at least about 70%, at least about 75%, at least about 80%, at least about 85%, at least about 90%, at least about 95%, at least about 96%, at least about 97%, at least about 98%, at least about 99%, or about 100% sequence identity to the sequence set forth in SEQ ID NO: 1768.

[0280] In some aspects, the IgD hinge derived CAR spacer of the present disclosure comprises a sequence disclosed in TABLE 1 or a sequence shown anywhere in the present disclosure, further comprising an N-terminal subsequence comprising 1, 2, 3, 4, or 5 IgD CH1 C-terminal domain amino acids from TABLE 2 covalently bound to the N-terminus of the IgD sequence from TABLE 1 or a sequence shown anywhere in the present disclosure.

[0281] In some aspects, the IgD hinge derived CAR spacer of the present disclosure comprises a sequence disclosed in TABLE 1 or a sequence shown anywhere in the present disclosure, further comprising a C-terminal subsequence comprising 1, 2, 3, 4, or 5 IgD CH2 N-terminal domain amino acids from TABLE 2 covalently bound to the C-terminus of the IgD sequence from TABLE 1 or a sequence shown anywhere in the present disclosure.

[0282] In some aspects, the IgD hinge derived CAR spacer of the present disclosure comprises a sequence disclosed in TABLE 1 or a sequence shown anywhere in the present disclosure, further comprising (i) an N-terminal subsequence comprising 1, 2, 3, 4, or 5 IgD CH1 C-terminal domain amino acids from TABLE 2 covalently bound to the N-terminus of the IgD sequence from TABLE 1 or a sequence shown anywhere in the present disclosure, and (ii) a C-terminal subsequence comprising 1, 2, 3, 4, or 5 IgD CH2 N-terminal domain amino acids from TABLE 2 covalently bound to the C-terminus of the IgD sequence from TABLE 1 or a sequence shown anywhere in the present disclosure.

[0283] IgD CH1 and CH2 sequences that can be appended to the N- and/or C-termini of the IgD hinge derived CAR spacer sequences of TABLE 1 or a sequence shown anywhere in the present disclosure are presented in TABLE 2.

TABLE 2
IgD. CH1 and CH2 optional N-terminal
CH1 sequences and C-terminal CH2
sequences (sequences from Uniprot
P01880-1 comprising 1 to 5 amino
acids flanking the full IgD hinge
of SEQ ID NO: 1)

| CH1 | | CH2 | |
|---|---|---|---|
| Length | Sequence | Length | Sequence |
| 1 | F | 1 | A |
| 2 | IF | 2 | AV |
| 3 | EIF | 3 | AVQ |
| 4 | KEIF | 4 | AVQD |
| | (SEQ ID | | (SEQ ID |
| | NO: 4519) | | NO: 4521) |
| 5 | KKEIF | 5 | AVQDL |
| | (SEQ ID | | (SEQ ID |
| | NO: 4520) | | NO: 4522) |

### HB. IgA Hinge Derived CAR Spacer

[0284] IgA is an antibody that pays a crucial role in the immune function of mucous membranes, and represents up to 15% of total immunoglobulins produced throughout the body. IgA has to subclasses: IgA1 and IgA2. In IgA2, the heavy and light chains are not linked with disulfide, but with noncovalent bonds.

[0285] The hinge region differs significantly between the two IgA isoforms. The hinge region of IgA1 is comprised of 23 residues (SEQ ID NO: 2560) and 5 0-glycosylation sites, while IgA2's hinge region is comprised of 10 residues (SEQ ID NO: 2713) and no sites of glycosylation. Both hinge regions are located at Cys220 on the Ch1 chain and end at Ch2's Pro244.

[0286] As used herein, the “IgA1 hinge” refers to the hinge region located between the CH1 and CH2 regions of IgA1 having the sequence set forth in SEQ ID NO: 2560.

[0287] As used herein, the term “IgA1 hinge derived CAR spacer” comprises, e.g., spacers comprising the full IgA1 hinge of SEQ ID NO: 2560 and fragments thereof, and variants thereof comprising 1, 2, 3, 4, 5 or more CH1 region and/or CH2 region amino acids.

[0288] Therefore, in some aspects, an IgA1 hinge derived CAR spacer comprises at least five, six, or seven consecutive amino acids of SEQ ID NO: 2560. Therefore, in some aspects, an IgA1 hinge derived CAR spacer comprises at least five, six, or seven consecutive amino acids of SEQ ID NO: 2560. In some aspects, the IgA1 hinge derived CAR spacer comprises an amino acid sequence having at least about 70%, at least about 75%, at least about 80%, at least about 85%, at least about 90%, at least about 95%, at least about 96%, at least about 97%, at least about 98%, at least about 99%, or about 100% sequence identity to the sequence set forth in SEQ ID NO: 2560.

[0289] In some aspects, a CAR comprising an IgA1 hinge derived spacer is capable of inducing an increased Interferon-γ level, e.g., at least 10%, at least about 20%, at least about 30%, at least about 40%, at least about 50%, at least about 60%, at least about 70%, at least about 80%, at least about 90%, at least about 100%, at least about 120%, at least about 150%, compared to a CAR comprising a reference spacer, e.g., a reference IgG4 spacer (e.g., a spacer of SEQ ID NO: 4911).

[0290] In some aspects, a CAR comprising an IgA1 hinge derived spacer is capable of inducing an increased Interleukin-2 level, e.g., at least 10%, at least about 20%, at least about 30%, at least about 40%, at least about 50%, at least about 60%, at least about 70%, at least about 80%, at least about 90%, at least about 100%, at least about 120%, at least about 150%, compared to a CAR comprising a reference spacer, e.g., a reference IgG4 spacer (e.g., a spacer of SEQ ID NO: 4911).

[0291] In some aspects, a CAR comprising an IgA1 derived spacer is capable of inducing an increased TNF-α level, e.g., at least 10%, at least about 20%, at least about 30%, at least about 40%, at least about 50%, at least about 60%, at least about 70%, at least about 80%, at least about 90%, at least about 100%, at least about 120%, at least about 150%, compared to a CAR comprising a reference spacer, e.g., a reference IgG4 spacer (e.g., a spacer of SEQ ID NO: 4911).

[0292] As used herein, the term “IgA2 hinge” refers to the IgA2 sequence located between the Cys220 at the C-terminus of the CH1 constant domain of the heavy chain of IgA2 and Pro244 at the N-terminus of the CH2 constant domain of the heavy chain of IgA2. In some aspects, the full IgA2 hinge consists of the sequence set forth in SEQ ID NO: 2713. As used herein, the term “IgA2 hinge” encompasses the hinges of different IgA2 allotypes, e.g., IgA2m, IgA2(m1), IgA2(m2) or IgA2(n). The first Pro in the canonical IgA2 hinge of SEQ ID NO: 2713 disclosed above is an Arg in the IgA2(m2) allotype hinge (i.e., it starts with RV instead of PV). Accordingly, the IgA2 CAR spacers of the present disclosure encompasses also forms in which Proline amino acids corresponding to position 1 of SEQ ID NO: 2713 (e.g., corresponding amino acids present in IgA2 fragments or any IgA2 derived sequences) are replaced with Arginines.

[0293] As used herein, the term “IgA2 derived CAR spacer” comprises, e.g., spacers comprising the full IgA2 hinge of SEQ ID NO: 2713 and fragments thereof, and variants thereof comprising 1, 2, 3, 4, 5 or more CH1 region and/or CH2 region amino acids. In some aspects, an IgA2 derived CAR spacer comprises at least five, six, or seven consecutive amino acids of SEQ ID NO: 4848. In some aspects, an IgA2 derived CAR spacer comprises an amino acid sequence having at least about 70%, at least about 75%, at least about 80%, at least about 85%, at least about 90%, at least about 95%, at least about 96%, at least about 97%, at least about 98%, at least about 99%, or about 100% sequence identity to the sequence set forth in SEQ ID NO: 4848.

[0294] In some aspects, a CAR comprising an IgA2 hinge derived spacer is capable of inducing an increased Interferon-γ level, e.g., at least 10%, at least about 20%, at least about 30%, at least about 40%, at least about 50%, at least about 60%, at least about 70%, at least about 80%, at least about 90%, at least about 100%, at least about 120%, at least about 150%, compared to a CAR comprising a reference spacer, e.g., a reference IgG4 spacer (e.g., a pacer of SEQ ID NO: 4911).

[0295] In some aspects, a CAR comprising an IgA2 hinge derived spacer is capable of inducing an increased Interleukin-2 level, e.g., at least 10%, at least about 20%, at least about 30%, at least about 40%, at least about 50%, at least about 60%, at least about 70%, at least about 80%, at least about 90%, at least about 100%, at least about 120%, at least about 150%, compared to a CAR comprising a reference spacer, e.g., a reference IgG4 spacer (e.g., a pacer of SEQ ID NO: 4911).

[0296] In some aspects, a CAR comprising an IgA2 hinge derived spacer is capable of inducing an increased TNF-α level, e.g., at least 10%, at least about 20%, at least about 30%, at least about 40%, at least about 50%, at least about 60%, at least about 70%, at least about 80%, at least about 90%, at least about 100%, at least about 120%, at least about 150%, compared to a CAR comprising a reference spacer, e.g., a reference IgG4 spacer (e.g., a spacer of SEQ ID NO: 4911).

[0297] In some aspects, an IgA2 derived CAR spacer of the present disclosure can, e.g., have the sequence set forth in SEQ ID NO: 4523 (i.e., an IgA2 hinge sequence with an N-terminal VPC sequence from CH1), SEQ ID NO: 4850, SEQ ID NO: 4524 (i.e, an IgA2 spacer sequence with an N-terminal VPC sequence from CH1 and a C-terminal PR sequence from CH2), or SEQ ID NO: 4525 (i.e, an IgA2 spacer sequence with an N-terminal PC sequence from CH1 and a C-terminal P sequence from CH2), wherein the VCP and PC N-terminal subsequences from SEQ ID NOS:3523, 4524, and 4525 are from the CH1 region and the C-terminal PR and P subsequences from SEQ ID NOS: 4524 and 4525 are from the CH2 region of the IgA2 immunoglobulin.

[0298] In some aspects, an IgA1 hinge derived CAR spacer of the present disclosure comprises, consists, or consist essentially of a sequence disclosed in TABLE 3.

TABLE 3
IgA1 derived spacers

| Length | SEQ ID | Length | SEQ ID | Length | SEQ ID |
|---|---|---|---|---|---|
| 23 | 2560 | 22 | 2561-2562 | 21 | 2563-2665 |
| 20 | 2566-2569 | 19 | 2570-2574 | 18 | 2575-2580 |
| 17 | 2581-2587 | 16 | 2588-2595 | 15 | 2596-2604 |
| 14 | 2605-2614 | 13 | 2615-2625 | 12 | 2626-2637 |
| 11 | 2638-2650 | 10 | 2651-2644 | 9 | 2665-2679 |
| 8 | 2680-2695 | 7 | 2696-2712 | | |

[0299] In some aspects, the IgA1 hinge derived CAR spacer comprises an amino acid sequence having at least about 70%, at least about 75%, at least about 80%, at least about 85%, at least about 90%, at least about 95%, at least about 96%, at least about 97%, at least about 98%, at least about 99%, or about 100% sequence identity to a sequence selected from the group consisting of SEQ ID NO: 4845; SEQ ID NO: 4846; SEQ ID NO: 4847; SEQ ID NO: 4848; SEQ ID NO: 4849; SEQ ID NO: 4850; SEQ ID NO: 4851; SEQ ID NO: 2560; SEQ ID NO: 4844; and any combination thereof.

[0300] In some aspects, the IgA1 hinge derived CAR spacer comprises an amino acid sequence having at least about 70%, at least about 75%, at least about 80%, at least about 85%, at least about 90%, at least about 95%, at least about 96%, at least about 97%, at least about 98%, at least about 99%, or about 100% sequence identity to the sequence set forth in SEQ ID NO: 4847.

[0301] In some aspects, the IgA1 hinge derived CAR spacer comprises an amino acid sequence having at least about 70%, at least about 75%, at least about 80%, at least about 85%, at least about 90%, at least about 95%, at least about 96%, at least about 97%, at least about 98%, at least about 99%, or about 100% sequence identity to the sequence set forth in SEQ ID NO: 4845.

[0302] In some aspects, the IgA1 hinge derived CAR spacer comprises an amino acid sequence having at least about 70%, at least about 75%, at least about 80%, at least about 85%, at least about 90%, at least about 95%, at least about 96%, at least about 97%, at least about 98%, at least about 99%, or about 100% sequence identity to the sequence set forth in SEQ ID NO: 4846.

[0303] In some aspects, the IgA1 hinge derived CAR spacer comprises an amino acid sequence having at least about 70%, at least about 75%, at least about 80%, at least about 85%, at least about 90%, at least about 95%, at least about 96%, at least about 97%, at least about 98%, at least about 99%, or about 100% sequence identity to the sequence set forth in SEQ ID NO: 2560.

[0304] In some aspects, the IgA1 hinge derived CAR spacer comprises an amino acid sequence having at least about 70%, at least about 75%, at least about 80%, at least about 85%, at least about 90%, at least about 95%, at least about 96%, at least about 97%, at least about 98%, at least about 99%, or about 100% sequence identity to the sequence set forth in SEQ ID NO: 4844.

[0305] In some aspects, the IgA1 hinge derived CAR spacer of the present disclosure comprises a sequence disclosed in TABLE 3 or any IgA1 hinge derived CAR spacer disclosed herein, further comprising an N-terminal subsequence comprising 1, 2, 3, 4, or 5 IgA1 CH1 C-terminal domain amino acids from TABLE 4 covalently bound to the N-terminus of the IgA1 sequence from TABLE 3 or any IgA1 hinge derived CAR spacer disclosed herein.

[0306] In some aspects, the IgA1 hinge derived CAR spacer of the present disclosure comprises a sequence disclosed in TABLE 3 or any IgA1 hinge derived CAR spacer disclosed herein, further comprising a C-terminal subsequence comprising 1, 2, 3, 4, or 5 IgA1 CH2 N-terminal domain amino acids from TABLE 4 covalently bound to the C-terminus of the IgA2 sequence from TABLE 3 or any IgA1 hinge derived CAR spacer disclosed herein.

[0307] In some aspects, the IgA1 hinge derived CAR spacer of the present disclosure comprises a sequence disclosed in TABLE 3 or any IgA1 hinge derived CAR spacer disclosed herein, further comprising (i) an N-terminal subsequence comprising 1, 2, 3, 4, or 5 IgA1 CH1 C-terminal domain amino acids from TABLE 4 covalently bound to the N-terminus of the IgA1 sequence from TABLE 3 or any IgA1 hinge derived CAR spacer disclosed herein, and (ii) a C-terminal subsequence comprising 1, 2, 3, 4, or 5 IgA1 CH2 N-terminal domain amino acids from TABLE 4 covalently bound to the C-terminus of the IgD sequence from TABLE 3 or any IgA1 hinge derived CAR spacer disclosed herein.

[0308] IgA1 CH1 and CH2 sequences that can be appended to the N- and/or C-termini of the IgA1 derived CAR spacer sequences of TABLE 3 or any IgA1 hinge derived CAR spacer disclosed herein are presented in TABLE 4.

TABLE 4
IgA1. CH1 and CH2 optional N-terminal
CH1 sequences and C-terminal CH2
(sequences from Uniprot P01876 comprising
1 to 5 amino acids flanking the full
IgAl hinge of sequences SEQ ID NO: 2560)

| CH1 | | CH2 | |
|---|---|---|---|
| Length | Sequence | Length | Sequence |
| 1 | C | 1 | P |
| 2 | PC | 2 | PR |
| 3 | VPC | 3 | PRL |
| 4 | TVPC | 4 | PRLS |
| | (SEQ ID | | (SEQ ID |
| | NO: 4526) | | NO: 4528) |
| 5 | VTVPC | 5 | PRLSL |
| | (SEQ ID | | (SEQ ID |
| | NO: 4527) | | NO: 4529) |

[0309] In some aspects, an IgA2 hinge derived CAR spacer of the present disclosure comprises at least five, six, or seven consecutive amino acids of the sequence set forth in SEQ ID NO: 2713. In some aspects, an IgA2 hinge derived CAR spacer of the present disclosure comprises an amino acid sequence having at least about 70%, at least about 75%, at least about 80%, at least about 85%, at least about 90%, at least about 95%, at least about 96%, at least about 97%, at least about 98%, at least about 99%, or about 100% sequence identity to the sequence set forth in SEQ ID NO: 2713.

[0310] In some aspects, an “IgA2 hinge derived CAR spacer” of the present disclosure comprises, consists, or consist essentially of a sequence disclosed in TABLE 5

TABLE 5
IgA2 derived spacers

| Length | SEQ ID | Length | SEQ ID |
|---|---|---|---|
| 10 | 2713 | 9 | 2714-2715 |
| 8 | 2716-2718 | 7 | 2719-2722 |

[0311] In some aspects, the IgA2 hinge derived CAR spacer of the present disclosure comprises a sequence disclosed in TABLE 5 or anywhere in the disclosure, further comprising an N-terminal subsequence comprising 1, 2, 3, 4, or 5 IgA2 CH1 C-terminal domain amino acids from TABLE 6 covalently bound to the N-terminus of the IgA2 sequence from TABLE 5 or anywhere in the disclosure.

[0312] In some aspects, the IgA2 hinge derived CAR spacer of the present disclosure comprises a sequence disclosed in TABLE 5 or anywhere in the disclosure, further comprising a C-terminal subsequence comprising 1, 2, 3, 4, or 5 IgA2 CH2 N-terminal domain amino acids from TABLE 6 covalently bound to the C-terminus of the IgA2 sequence from TABLE 5 or anywhere in the disclosure.

[0313] In some aspects, the IgA2 hinge derived CAR spacer of the present disclosure comprises a sequence disclosed in TABLE 5 or anywhere in the disclosure, further comprising (i) an N-terminal subsequence comprising 1, 2, 3, 4, or 5 IgA2 CH1 C-terminal domain amino acids from TABLE 6 covalently bound to the N-terminus of the IgA2 sequence from TABLE 5 or anywhere in the disclosure, and (ii) a C-terminal subsequence comprising 1, 2, 3, 4, or 5 IgA2 CH2 N-terminal domain amino acids from TABLE 6 covalently bound to the C-terminus of the IgA2 sequence from TABLE 5 or anywhere in the disclosure.

[0314] IgA2 CH1 and CH2 sequences that can be appended to the N- and/or C-termini of the IgA2 derived CAR spacer sequences of TABLE 5 or anywhere in the disclosure are presented in TABLE 6.

[0315] In some aspects, the N-terminal proline of a full length IgA2 hinge of SEQ ID NO:2713 can be replaced with an arginine (see, e.g., Uniprot P01877). Accordingly, in some aspects, a full length IgA2 hinge disclosed herein has the sequence set forth in SEQ ID NO: 4530.

TABLE 6
IgA2. CH1 and CH2 optional N-terminal
CH1 sequences and C-terminal CH2
sequences (sequences from Uniprot P01877
comprising 1 to 5 amino acids flanking
the full IgA2 hinge of SEQ ID NO: 2713)

| CH1 | | CH2 | |
|---|---|---|---|
| Length | Sequences | Length | Sequences |
| 1 | C | 1 | P |
| 2 | PC | 2 | PR |
| 3 | VPC | 3 | PRL |
| 4 | TVPC | 4 | PRLS |
| | (SEQ ID | | (SEQ ID |
| | NO: 4526) | | NO: 2528) |
| 5 | VTVPC | 5 | PRLSL |
| | (SEQ ID | | (SEQ ID |
| | NO: 4527) | | NO: 4529) |

[0316] In some aspects, the IgA2 hinge derived CAR spacer comprises an amino acid sequence having at least about 70%, at least about 75%, at least about 80%, at least about 85%, at least about 90%, at least about 95%, at least about 96%, at least about 97%, at least about 98%, at least about 99%, or about 100% sequence identity to the sequence set forth in SEQ ID NO: 4848.

[0317] In some aspects, the IgA2 hinge derived CAR spacer comprises an amino acid sequence at least about 70%, at least about 75%, at least about 80%, at least about 85%, at least about 90%, at least about 95%, at least about 96%, at least about 97%, at least about 98%, at least about 99%, or about 100% sequence identity to the sequence set forth in SEQ ID NO: 4849.

[0318] In some aspects, the IgA2 hinge derived CAR spacer comprises an amino acid sequence at least about 70%, at least about 75%, at least about 80%, at least about 85%, at least about 90%, at least about 95%, at least about 96%, at least about 97%, at least about 98%, at least about 99%, or about 100% sequence identity to the sequence set forth in SEQ ID NO: 4850.

[0319] In some aspects, the IgA2 hinge derived CAR spacer comprises an amino acid sequence at least about 70%, at least about 75%, at least about 80%, at least about 85%, at least about 90%, at least about 95%, at least about 96%, at least about 97%, at least about 98%, at least about 99%, or about 100% sequence identity to the sequence set forth in SEQ ID NO: 4851.

### II.C. IgG Hinge Derived CAR Spacer

[0320] Of the five immunoglobulin isotypes, immunoglobulin G (IgG) is most abundant in human serum. The four subclasses, IgG1, IgG2, IgG3, and IgG4, which are highly conserved, differ in their constant region, particularly in their hinges and upper CH2 domains. These regions are involved in binding to both IgG-Fc receptors (FcγR) and C1q. As a result, the different subclasses have different effector functions, both in terms of triggering FcγR-expressing cells, resulting in phagocytosis or antibody-dependent cell-mediated cytotoxicity, and activating complement.

[0321] The hinge exon of IgG1 encompasses a very flexible hinge (SEQ ID NO:2723). IgG2 has a shorter hinge than IgG1 (SEQ ID NO:2768). The lower hinge region of IgG2 (actually encoded by the CH2 region) also has a one amino acid deletion (lacking one of the double Glycines found at position 235-6 of the IgG1 lower hinge), resulting in IgG2 having the shortest hinge of all the IgG subclasses. In addition, the hinges of IgG2 are even more rigid due to a poly-proline helix, stabilized by up to four (with some exceptions discussed below) extra inter-heavy chain disulfide bridges. These properties restrict the flexibility of the IgG2 molecule. Similarly, the hinge region of IgG4 (SEQ ID NO: 4453) is also shorter than the IgG1 hinge region. The flexibility of the hinge region of IgG4 is intermediate between that of IgG1 and IgG2. Unlike the IgG2 hinge, the IgG4 hinge contains the double Glycines found at position 235-6 of the IgG1 lower hinge.

[0322] IgG3 has a much longer hinge region than any other IgG subclasses or Ig human isotype, i.e., about four times as long as the IgG1 hinge, containing up to 62 amino acids (including 21 prolines and 11 cysteines), forming a poly-proline helix with limited flexibility (SEQ ID NO:2813). The exact length of the hinge varies between allotypes of IgG3, which apparently has undergone much more evolutionary radiation than the other subclasses. In IgG3, the Fab fragments are relatively far away from the Fc fragment, giving the molecule a greater flexibility. This long hinge of IgG3 is a result of duplications of a hinge exon, encoded by one exon in IgG1, IgG2, and IgG4, but up to four exons in IgG3. One of those exons is common to all IgG3 allotypes, but it also has 1-3 copies of a homologous second type of IgG3-hinge exon. The elongated hinge in IgG3 is also responsible for its higher molecular weight compared to the other subclasses. The difference in hinge flexibility influences the relative orientation and movement of the Fab arms and Fc tail of the IgG antibody.

[0323] In IgG2, structural hinge isomers have been observed as a result of alternative formation of disulfide bonds between the cysteines in the hinge region of the heavy chains and those involved in the formation of disulfide bonds between the light and heavy chain. These isomers were found particularly in IgG2 antibodies with kappa-light chains, but much less for lambda light chains. The major forms are the classical A form, with four disulfide bridges between the two IgG2 heavy chains, and the B form in which one hinge cysteine forms a disulfide bond with the light chain. However, other configurations exist, as these isoforms apparently form independent of each other, giving rise to A/A, B/B, but also AB isoforms

[0324] Two isomers of IgG4 differing in the disulfide bonding of hinge cysteines coexist. The core hinge of IgG is formed by a CXXC motif, also found in redox-reactive proteins such as thioredoxins. Compared to IgG1, with a relatively rigid CPPC (SEQ ID NO: 4531) motif, intra-chain disulfide bonds are more easily formed between these cysteines found at positions 226 and 229 in IgG4, which possesses a CPSC (SEQ ID NO:4532) core hinge. The result is an observable amount of non-covalently linked half-molecules (consisting of one heavy and one light chain, HL, as opposed to the classical configuration of H2L2) in addition to covalently linked inter-chain isomers. An S228P mutant of IgG4, thus with an IgG1-core hinge, does not form half-molecules, which is in agreement with the finding that this species does not occur in IgG1.

[0325] As used herein, the term “IgG1 hinge” refers to the core plus upper hinge of a IgG1 hinge, i.e., the sequence set forth in SEQ ID NO:2723. In some aspects, the IgG1 hinge also comprises the lower hinge (SEQ ID NO:4533) or a subsequence thereof. In some aspects, the subsequence of the IgG1 lower hinge appended to the C-terminus of the IgG1 hinge of SEQ ID NO:2723 or an N-terminal truncation thereof (i.e., a fragment of SEQ ID NO:2723 in which one or more amino acid residues have been removed from its N-terminal region) is selected from the group consisting of A, AP, APE, APEL (SEQ ID NO: 4534), APELL (SEQ ID NO:4535), APELLG (SEQ ID NO:4536), APELLGG (SEQ ID NO:4537), and APELLGGP (SEQ ID NO:4533).

[0326] In some aspects, an IgG1 hinge derived CAR spacer comprises at least five, six, or seven consecutive amino acids of the sequence set forth in SEQ ID NO: 2723 or SEQ ID NO: 4839. In some aspects, the IgG1 hinge derived CAR spacer comprises an amino acid sequence having at least about 70%, at least about 75%, at least about 80%, at least about 85%, at least about 90%, at least about 95%, at least about 96%, at least about 97%, at least about 98%, at least about 99%, or about 100% sequence identity to the sequence set forth in SEQ ID NO: 2723.

[0327] In some aspects, a CAR comprising an IgG1 hinge derived spacer is capable of inducing an increased Interferon-γ level, e.g., at least 10%, at least about 20%, at least about 30%, at least about 40%, at least about 50%, at least about 60%, at least about 70%, at least about 80%, at least about 90%, at least about 100%, at least about 120%, at least about 150%, compared to a CAR comprising a reference spacer, e.g., a reference IgG4 spacer (e.g., a spacer of SEQ ID NO: 4911).

[0328] In some aspects, a CAR comprising an IgG1 hinge derived spacer is capable of inducing an increased Interleukin-2 level, e.g., at least 10%, at least about 20%, at least about 30%, at least about 40%, at least about 50%, at least about 60%, at least about 70%, at least about 80%, at least about 90%, at least about 100%, at least about 120%, at least about 150%, compared to a CAR comprising a reference spacer, e.g., a reference IgG4 spacer (e.g., a spacer of SEQ ID NO: 4911).

[0329] In some aspects, a CAR comprising an IgG1 derived spacer is capable of inducing an increased TNF-α level, e.g., at least 10%, at least about 20%, at least about 30%, at least about 40%, at least about 50%, at least about 60%, at least about 70%, at least about 80%, at least about 90%, at least about 100%, at least about 120%, at least about 150%, compared to a CAR comprising a reference spacer, e.g., a reference IgG4 spacer (e.g., a spacer of SEQ ID NO: 4911).

[0330] In some aspects, the IgG1 hinge derived spacer is not the sequence set forth in SEQ ID NO: 2723. In some aspects, an IgG1 hinge derived CAR spacer comprises at least five, six, or seven consecutive amino acids of SEQ ID NO: 2723, but is not SEQ ID NO: 2723.

[0331] As used herein, the term “IgG1 hinge derived CAR spacer” comprises, e.g., a spacer comprising an IgG1 hinge of SEQ ID NO: 2723 (upper plus core hinge), an IgG1 hinge of SEQ ID NO: 4538 (upper hinge, core hinge, and lower hinge), fragments thereof, and variants thereof comprising 1, 2, 3, 4, 5 or more additional CH1 region and/or CH2 region amino acids. In some aspects, the term IgG1 derived CAR spacer refers to a subsequence of an IgG1 hinge of SEQ ID NO: 4538 (upper hinge, core hinge, and lower hinge), wherein the subsequence comprises 7, 8, 9, 10, 11, 12, 13, 14, 15, 16, 17, 18, 19, 20, 21, or 22 consecutive amino acids from the polypeptide sequence set forth in SEQ ID NO: 4538.

[0332] In some aspects, an “IgG1 hinge derived CAR spacer” of the present disclosure comprises, consists, or consist essentially of a sequence disclosed in TABLE 7.

TABLE 7
IgG1 derived spacers

| Length | SEQ ID | Length | SEQ ID | Length | SEQ ID |
|---|---|---|---|---|---|
| 15 | 2723 | 14 | 2724-2725 | 13 | 2726-2728 |
| 12 | 2729-2732 | 11 | 2733-2737 | 10 | 2738-2743 |
| 9 | 2744-2750 | 8 | 2751-2758 | 7 | 2759-2767 |

[0333] In some aspects, the IgG1 hinge derived CAR spacer comprises an amino acid sequence having at least about 70%, at least about 75%, at least about 80%, at least about 85%, at least about 90%, at least about 95%, at least about 96%, at least about 97%, at least about 98%, at least about 99%, or about 100% sequence identity to the sequence sent forth in SEQ ID NO: 4840.

[0334] In some aspects, the IgG1 hinge derived CAR spacer comprises an amino acid sequence having at least about 70%, at least about 75%, at least about 80%, at least about 85%, at least about 90%, at least about 95%, at least about 96%, at least about 97%, at least about 98%, at least about 99%, or about 100% sequence identity to the sequence set forth in SEQ ID NO: 4839.

[0335] In some aspects, the IgG1 hinge derived CAR spacer comprises an amino acid sequence having at least about 70%, at least about 75%, at least about 80%, at least about 85%, at least about 90%, at least about 95%, at least about 96%, at least about 97%, at least about 98%, at least about 99%, or about 100% sequence identity to the sequence set forth in SEQ ID NO: 4843.

[0336] In some aspects, the IgG1 hinge derived CAR spacer of the present disclosure comprises a sequence disclosed in TABLE 7 or anywhere in the disclosure, further comprising an N-terminal subsequence comprising 1, 2, 3, 4, or 5 IgG1 CH1 C-terminal domain amino acids from TABLE 8 covalently bound to the N-terminus of the IgG1 sequence from TABLE 7 or anywhere in the disclosure.

[0337] In some aspects, the IgG1 hinge derived CAR spacer of the present disclosure comprises a sequence disclosed in TABLE 7 or anywhere in the disclosure, further comprising a C-terminal subsequence comprising 1, 2, 3, 4, or 5 IgG1 CH2 N-terminal domain amino acids from TABLE 8 covalently bound to the C-terminus of the IgG1 sequence from TABLE 7 or anywhere in the disclosure.

[0338] In some aspects, the IgG1 hinge derived CAR spacer of the present disclosure comprises a sequence disclosed in TABLE 7 or anywhere in the disclosure, further comprising (i) an N-terminal subsequence comprising 1, 2, 3, 4, or 5 IgG1 CH1 C-terminal domain amino acids from TABLE 8 covalently bound to the N-terminus of the IgG1 sequence from TABLE 7 or anywhere in the disclosure, and (ii) a C-terminal subsequence comprising 1, 2, 3, 4, or 5 IgG1 CH2 N-terminal domain amino acids from TABLE 8 covalently bound to the C-terminus of the IgG1 sequence from TABLE 7 or anywhere in the disclosure.

[0339] IgG1 CH1 and CH2 sequences that can be appended to the N- and/or C-termini of the IgG1 hinge derived CAR spacer sequences of TABLE 7 or anywhere in the disclosure are presented in TABLE 8.

TABLE 8
IgG1. CH1 and CH2 optional N-terminal
CH1 sequences and C-terminal CH2
sequences (sequences from Uniprot P01857
comprising 1 to 5 amino acids flanking
the full IgG1 hinge of SEQ ID NO: 2723)

| CH1 | | CH2 | |
|---|---|---|---|
| Length | Sequences | Length | Sequences |
| 1 | V | 1 | A |
| 2 | KV | 2 | AP |
| 3 | KKV | 3 | APE |
| 4 | DKKV | 4 | APEL |
| | (SEQ ID | | (SEQ ID |
| | NO: 4539) | | NO: 4534) |
| 5 | VDKKV | 5 | APELL |
| | (SEQ ID | | (SEQ ID |
| | NO: 4540) | | NO: 4535) |

[0340] As used herein, the term “IgG2 hinge” refers to the core plus upper hinge of a IgG2 hinge, i.e., the sequence set forth in SEQ ID NO:2768. In some aspects, the IgG2 hinge comprises also the lower hinge, i.e., the sequence set forth in SEQ ID NO:4453 or a subsequence thereof. In some aspects, the subsequence of the IgG2 lower hinge appended to the C-terminus of the IgG2 hinge of SEQ ID NO:2768 or an N-terminal truncation thereof (i.e., a fragment of SEQ ID NO:2768 in which one or more amino acid residues have been removed from its N-terminal region) is selected from the group consisting of A, AP, APE, APEL (SEQ ID NO: 4534), APELL (SEQ ID NO:4535), APELLG (SEQ ID NO:4536), APELLGG (SEQ ID NO:4537), and APELLGGP (SEQ ID NO:4533).

[0341] In some aspects, an IgG2 hinge derived CAR spacer comprises at least five, six, or seven consecutive amino acids of the sequence set forth in SEQ ID NO: 2768. In some aspects, the IgG2 hinge derived CAR spacer comprises an amino acid sequence having at least about 70%, at least about 75%, at least about 80%, at least about 85%, at least about 90%, at least about 95%, at least about 96%, at least about 97%, at least about 98%, at least about 99%, or about 100% sequence identity to the sequence set forth in SEQ ID NO: 2768.

[0342] In some aspects, a CAR comprising an IgG2 hinge derived spacer is capable of inducing an increased Interferon-γ level, e.g., at least 10%, at least about 20%, at least about 30%, at least about 40%, at least about 50%, at least about 60%, at least about 70%, at least about 80%, at least about 90%, at least about 100%, at least about 120%, at least about 150%, compared to a CAR comprising a reference spacer, e.g., a reference IgG4 spacer (e.g., a spacer of SEQ ID NO: 4911).

[0343] In some aspects, a CAR comprising an IgG2 hinge derived spacer is capable of inducing an increased Interleukin-2 level, e.g., at least 10%, at least about 20%, at least about 30%, at least about 40%, at least about 50%, at least about 60%, at least about 70%, at least about 80%, at least about 90%, at least about 100%, at least about 120%, at least about 150%, compared to a CAR comprising a reference spacer, e.g., a reference IgG4 spacer (e.g., a spacer of SEQ ID NO: 4911).

[0344] In some aspects, a CAR comprising an IgG2 derived spacer is capable of inducing an increased TNF-α level, e.g., at least 10%, at least about 20%, at least about 30%, at least about 40%, at least about 50%, at least about 60%, at least about 70%, at least about 80%, at least about 90%, at least about 100%, at least about 120%, at least about 150%, compared to a CAR comprising a reference spacer, e.g., a reference IgG4 spacer (e.g., a spacer of SEQ ID NO: 4911).

[0345] In some aspects, an IgG2 hinge derived CAR spacer comprises at least five, six, or seven consecutive amino acids of the sequence set forth in SEQ ID NO: 2768, but is not SEQ ID NO:4985.

[0346] In some aspects, the term “IgG2 hinge derived CAR spacer” refers, e.g., to a spacer comprising a human IgG2 hinge of SEQ ID NO: 2768 (upper plus core hinge), a human IgG2 hinge of SEQ ID NO: 4541 (upper hinge, core hinge, and lower hinge), fragments thereof, and variants thereof comprising 1, 2, 3, 4, 5 or more additional CH1 region and/or CH2 region amino acids. In some aspects, the term IgG2 derived CAR spacer refers to a subsequence of a human IgG2 hinge of SEQ ID NO: 4541 (upper hinge, core hinge, and lower hinge), wherein the subsequence comprises 7, 8, 9, 10, 11, 12, 13, 14, 15, 16, 17, 18, 19, 20, 21, or 22 consecutive amino acids from the polypeptide sequence set forth in SEQ ID NO: 4541.

[0347] In some aspects, an “IgG2 hinge derived CAR spacer” of the present disclosure comprises, consists, or consist essentially of a sequence disclosed in TABLE 9A.

TABLE 9A
Human IgG2 derived spacers

| Length | SEQ ID | Length | SEQ ID | Length | SEQ ID |
|---|---|---|---|---|---|
| 11 | 2768 | 10 | 2769-2770 | 9 | 2771-2773 |
| 8 | 2774-2777 | 7 | 2778-2782 | | |

[0348] In some aspects, the IgG2 hinge derived CAR spacer comprises an amino acid sequence having at least about 70%, at least about 75%, at least about 80%, at least about 85%, at least about 90%, at least about 95%, at least about 96%, at least about 97%, at least about 98%, at least about 99%, or about 100% sequence identity to the sequence set forth in SEQ ID NO: 4842.

[0349] In some aspects, the IgG2 hinge derived CAR spacer comprises an amino acid sequence having at least about 70%, at least about 75%, at least about 80%, at least about 85%, at least about 90%, at least about 95%, at least about 96%, at least about 97%, at least about 98%, at least about 99%, or about 100% sequence identity to the sequence set forth in SEQ ID NO: 2768.

[0350] In some aspects, a CAR comprising a human IgG2 hinge derived spacer disclosed herein is capable of inducing an increased Interferon-γ level, e.g., at least 10%, at least about 20%, at least about 30%, at least about 40%, at least about 50%, at least about 60%, at least about 70%, at least about 80%, at least about 90%, at least about 100%, at least about 120%, at least about 150%, compared to a CAR comprising a reference spacer, e.g., a reference IgG4 spacer (e.g., a spacer of SEQ ID NO: 4911).

[0351] In some aspects, a CAR comprising the IgG2 hinge derived spacer is capable of inducing an increased Interleukin-2 level, e.g., at least 10%, at least about 20%, at least about 30%, at least about 40%, at least about 50%, at least about 60%, at least about 70%, at least about 80%, at least about 90%, at least about 100%, at least about 120%, at least about 150%, compared to a CAR comprising a reference spacer, e.g., a reference IgG4 spacer (e.g., a spacer of SEQ ID NO: 4911). In some aspects, the IgG2 hinge derived CAR spacer is not the sequence set forth in SEQ ID NO: 4986.

[0352] In some aspects, a CAR comprising the IgG2 derived spacer is capable of inducing an increased TNF-α level, e.g., at least 10%, at least about 20%, at least about 30%, at least about 40%, at least about 50%, at least about 60%, at least about 70%, at least about 80%, at least about 90%, at least about 100%, at least about 120%, at least about 150%, compared to a CAR comprising a reference spacer, e.g., a reference IgG4 spacer (e.g., a spacer of SEQ ID NO: 4911).

[0353] In some aspects, the human IgG2 hinge derived CAR spacer of the present disclosure comprises a sequence disclosed in TABLE 9A or anywhere in the disclosure, further comprising an N-terminal subsequence comprising 1, 2, 3, 4, or 5 IgG2 CH1 C-terminal domain amino acids from TABLE 10A covalently bound to the N-terminus of the IgG2 sequence from TABLE 9A or anywhere in the disclosure.

[0354] In some aspects, the human IgG2 hinge derived CAR spacer of the present disclosure comprises a sequence disclosed in TABLE 9A or anywhere in the disclosure, further comprising a C-terminal subsequence comprising 1, 2, 3, 4, or 5 IgG2 CH2 N-terminal domain amino acids from TABLE 10A covalently bound to the C-terminus of the IgG2 sequence from TABLE 9A or anywhere in the disclosure.

[0355] In some aspects, the human IgG2 hinge derived CAR spacer of the present disclosure comprises a sequence disclosed in TABLE 9A or anywhere in the disclosure, further comprising (i) an N-terminal subsequence comprising 1, 2, 3, 4, or 5 IgG2 CH1 C-terminal domain amino acids from TABLE 10A covalently bound to the N-terminus of the IgG2 sequence from TABLE 9A or anywhere in the disclosure, and (ii) a C-terminal subsequence comprising 1, 2, 3, 4, or 5 IgG2 CH2 N-terminal domain amino acids from TABLE 10A covalently bound to the C-terminus of the IgG2 sequence from TABLE 9A or anywhere in the disclosure.

[0356] IgG2 CH1 and CH2 sequences that can be appended to the N- and/or C-termini of the IgG2 hinge derived CAR spacer sequences of TABLE 9A are presented in TABLE 10A.

TABLE 10A
Human IgG2. CH1 and CH2 optional
N-terminal CH1 sequences and C-terminal CH2
sequences (sequences from Uniprot P01859
comprising 1 to 5 amino acids flanking
the full IgG2 hinge of SEQ ID NO: 2768)

| CH1 | | CH2 | |
|---|---|---|---|
| Length | Sequence | Length | Sequence |
| 1 | V | 1 | P |
| 2 | TV | 2 | PA |
| 3 | KTV | 3 | PAP |
| 4 | DKTV | 4 | PAPP |
| | (SEQ ID | | (SEQ ID |
| | NO: 4542) | | NO: 4544) |
| 5 | KDKTV | 5 | PAPPV |
| | (SEQ ID | | (SEQ ID |
| | NO: 4543) | | NO: 4545) |

[0357] In some aspects, the term “IgG2 hinge derived CAR spacer” refers, e.g., to a spacer comprising a murine IgG2 hinge of SEQ ID NO: 4926 (upper plus core hinge), a murine IgG2 hinge of SEQ ID NO: 4992 (upper hinge, core hinge, and lower hinge), fragments thereof, and variants thereof comprising 1, 2, 3, 4, 5 or more additional CH1 region and/or CH2 region amino acids. In some aspects, the term IgG2 derived CAR spacer refers to a subsequence of a murine IgG2 hinge of SEQ ID NO: 4992 (upper hinge, core hinge, and lower hinge), wherein the subsequence comprises 7, 8, 9, 10, 11, 12, 13, 14, 15, 16, 17, 18, 19, 20, 21, or 22 consecutive amino acids from the polypeptide sequence set forth in SEQ ID NO: 4992.

[0358] In some aspects, an “IgG2 hinge derived CAR spacer” of the present disclosure is a “murine IgG2 hinge derived CAR spacer” comprising, consisting, or consisting essentially of a sequence disclosed in TABLE 9B.

TABLE 9B
Murine IgG2A hinge derived CAR spacers

| Length | SEQ ID | Length | SEQ ID | Length | SEQ ID |
|---|---|---|---|---|---|
| 16 | 4926 | 15 | 4927-4928 | 14 | 4929-4931 |
| 13 | 4932-4935 | 12 | 4936-4940 | 11 | 4941-4946 |
| 10 | 4947-4953 | 9 | 4954-4961 | 8 | 4962-4970 |
| 7 | 4971-4980 | | | | |

[0359] In some aspects, the murine IgG2 hinge derived CAR spacer comprises at least five, six, or seven consecutive amino acids of the sequence set forth in SEQ ID NO: 4830. In some aspects, the murine IgG2 hinge derived CAR spacer comprises at least five, six, or seven consecutive amino acids of the sequence set forth in SEQ ID NO: 4831. In some aspects, the murine IgG2 hinge derived CAR spacer comprises at least five, six, or seven consecutive amino acids of the sequence set forth in SEQ ID NO: 4832.

[0360] In some aspects, the murine IgG2 hinge derived CAR spacer comprises an amino acid sequence having at least about 70%, at least about 75%, at least about 80%, at least about 85%, at least about 90%, at least about 95%, at least about 96%, at least about 97%, at least about 98%, at least about 99%, or about 100% sequence identity to the sequence set forth in SEQ ID NO: 4830. In some aspects, the murine IgG2 hinge derived CAR spacer comprises an amino acid sequence having at least about 70%, at least about 75%, at least about 80%, at least about 85%, at least about 90%, at least about 95%, at least about 96%, at least about 97%, at least about 98%, at least about 99%, or about 100% sequence identity to the sequence set forth in SEQ ID NO: 4831. In some aspects, the murine IgG2 hinge derived CAR spacer comprises an amino acid sequence having at least about 70%, at least about 75%, at least about 80%, at least about 85%, at least about 90%, at least about 95%, at least about 96%, at least about 97%, at least about 98%, at least about 99%, or about 100% sequence identity to the sequence set forth in SEQ ID NO: 4832.

[0361] In some aspects, a CAR comprising a murine IgG2 hinge derived CAR spacer disclosed herein is capable of inducing an increased Interferon-γ level, e.g., at least 10%, at least about 20%, at least about 30%, at least about 40%, at least about 50%, at least about 60%, at least about 70%, at least about 80%, at least about 90%, at least about 100%, at least about 120%, at least about 150%, compared to a CAR comprising a reference spacer, e.g., a reference IgG4 spacer (e.g., a spacer of SEQ ID NO: 4911).

[0362] In some aspects, a CAR comprising a murine IgG2 hinge derived CAR spacer disclosed herein is capable of inducing an increased Interleukin-2 level, e.g., at least 10%, at least about 20%, at least about 30%, at least about 40%, at least about 50%, at least about 60%, at least about 70%, at least about 80%, at least about 90%, at least about 100%, at least about 120%, at least about 150%, compared to a CAR comprising a reference spacer, e.g., a reference IgG4 spacer (e.g., a spacer of SEQ ID NO: 4911). In some aspects, the murine IgG2 hinge derived CAR spacer is not the sequence set forth in SEQ ID NO: 4986.

[0363] In some aspects, a CAR comprising the murine IgG2 derived CAR spacer is capable of inducing an increased TNF-α level, e.g., at least 10%, at least about 20%, at least about 30%, at least about 40%, at least about 50%, at least about 60%, at least about 70%, at least about 80%, at least about 90%, at least about 100%, at least about 120%, at least about 150%, compared to a CAR comprising a reference spacer, e.g., a reference IgG4 spacer (e.g., a spacer of SEQ ID NO: 4911).

[0364] In some aspects, the murine IgG2 hinge derived CAR spacer of the present disclosure comprises a sequence disclosed in TABLE 9B or anywhere in the disclosure, further comprising an N-terminal subsequence comprising 1, 2, 3, 4, or 5 IgG2 CH1 C-terminal domain amino acids from TABLE 10B covalently bound to the N-terminus of the IgG2 sequence from TABLE 9B or anywhere in the disclosure.

[0365] In some aspects, the murine IgG2 hinge derived CAR spacer of the present disclosure comprises a sequence disclosed in TABLE 9B or anywhere in the disclosure, further comprising a C-terminal subsequence comprising 1, 2, 3, 4, or 5 IgG2 CH2 N-terminal domain amino acids from TABLE 10B covalently bound to the C-terminus of the IgG2 sequence from TABLE 9B or anywhere in the disclosure.

[0366] In some aspects, the murine IgG2 hinge derived CAR spacer of the present disclosure comprises a sequence disclosed in TABLE 9B or anywhere in the disclosure, further comprising (i) an N-terminal subsequence comprising 1, 2, 3, 4, or 5 IgG2 CH1 C-terminal domain amino acids from TABLE 10B covalently bound to the N-terminus of the IgG2 sequence from TABLE 9B or anywhere in the disclosure, and (ii) a C-terminal subsequence comprising 1, 2, 3, 4, or 5 IgG2 CH2 N-terminal domain amino acids from TABLE 10B covalently bound to the C-terminus of the IgG2 sequence from TABLE 9B or anywhere in the disclosure.

[0367] IgG2 CH1 and CH2 sequences that can be appended to the N- and/or C-termini of the IgG2 hinge derived CAR spacer sequences of TABLE 9B are presented in TABLE 10B.

TABLE 10B
Murine IgG2A.
CH1 and CH2 optional N-terminal CH1
sequences and C-terminal CH2 sequences
(sequences from Uniprot P01865 comprising
1 to 5 amino acids flanking the full
murine IgG2A hinge of SEQ ID NO: 4926)

| CH1 | | CH2 | |
|---|---|---|---|
| Length | Sequence | Length | Sequence |
| 1 | I | 1 | A |
| 2 | KI | 2 | AP |
| 3 | KKI | 3 | APN |
| 4 | DKKI | 4 | APNL |
| | (SEQ ID | | (SEQ ID |
| | NO: 4981) | | NO: 4983) |
| 5 | VDKKI | 5 | APNLL |
| | (SEQ ID | | (SEQ ID |
| | NO: 4982) | | NO: 4984) |

[0368] As used herein, the term “IgG3 hinge” refers to the core plus upper hinge of a IgG3 hinge, i.e., the sequence set forth in SEQ ID NO:2813. In some aspects, the IgG3 hinge comprises also the lower hinge (APELLGGP; SEQ ID NO:4533).

[0369] The long hinge of IgG3 is a result of duplications of a hinge exon, encoded by one exon in IgG1, IgG2, and IgG4, but up to four exons in IgG3. One of those exons is common to all IgG3 allotypes, but it also has 1-3 copies of a homologous second type of IgG3-hinge exon. Depending on the number of sequence repeats, the hinge region can vary from 27 to 83 amino acid residues between different IgG3 allotypes (see FIG. 6). As shown in FIG. 6, the different IgG3 allotypes identified include a hinge with a pattern corresponding to a, ab, abb, or abbb, wherein “a” is the sequence set forth in SEQ ID NO: 3848 and “b” is the sequence set forth in SEQ ID NO: 3958. In some aspects, the “b” sequence is a sequence set forth in SEQ ID NO: 4546 (human variant), SEQ ID NO:4547 (Pan troglodytes), SEQ ID NO: 4548 (Pan troglodytes), SEQ ID NO:4549 (Pongo pygmaeus), SEQ ID NO:4550 (Gorilla gorilla), or SEQ ID NO: 4551 (Pongo abelii).

[0370] In some aspects, an IgG3 hinge derived CAR spacer comprises at least five, six, or seven consecutive amino acids of the sequence set forth in SEQ ID NO: 2813.

[0371] In some aspects, a CAR comprising a IgG3 hinge derived spacer is capable of inducing an increased Interferon-γ level, e.g., at least 10%, at least about 20%, at least about 30%, at least about 40%, at least about 50%, at least about 60%, at least about 70%, at least about 80%, at least about 90%, at least about 100%, at least about 120%, at least about 150%, compared to a CAR comprising a reference spacer, e.g., a reference IgG4 spacer (e.g., a spacer of SEQ ID NO: 4911).

[0372] In some aspects, a CAR comprising a IgG3 hinge derived spacer is capable of inducing an increased Interleukin-2 level, e.g., at least 10%, at least about 20%, at least about 30%, at least about 40%, at least about 50%, at least about 60%, at least about 70%, at least about 80%, at least about 90%, at least about 100%, at least about 120%, at least about 150%, compared to a CAR comprising a reference spacer, e.g., a reference IgG4 spacer (e.g., a spacer of SEQ ID NO: 4911).

[0373] In some aspects, a CAR comprising the IgG3 derived spacer is capable of inducing an increased TNF-α level, e.g., at least 10%, at least about 20%, at least about 30%, at least about 40%, at least about 50%, at least about 60%, at least about 70%, at least about 80%, at least about 90%, at least about 100%, at least about 120%, at least about 150%, compared to a CAR comprising a reference spacer, e.g., a reference IgG4 spacer (e.g., a spacer of SEQ ID NO: 4911).

[0374] In some aspects, an IgG3 hinge derived CAR spacer is not SEQ ID NO:2813.

[0375] In some aspects, the IgG3 hinge derived CAR spacer comprises an amino acid sequence having at least about 70%, at least about 75%, at least about 80%, at least about 85%, at least about 90%, at least about 95%, at least about 96%, at least about 97%, at least about 98%, at least about 99%, or about 100% sequence identity to the sequence set forth in SEQ ID NO: 2813.

[0376] As used herein, the term “IgG3 hinge derived CAR spacer” comprises, e.g., a spacer comprising an IgG3 hinge of SEQ ID NO: 2813 (upper plus core hinge), an IgG3 hinge of SEQ ID NO: 4552 (upper hinge, core hinge, and lower hinge), fragments thereof, and variants thereof comprising 1, 2, 3, 4, 5 or more additional CH1 region and/or CH2 region amino acids.

[0377] In some aspects, an IgG3 hinge derived CAR spacer disclosed comprises one of more mutations replacing the Threonine (T) in the subsequence set forth in SEQ ID NO:4553. These threonines are susceptible to glycosylation and also are substrates for trypsin and proteinase K. Accordingly, their replacement can reduce the immunogenicity caused by the CAR spacer and increase resistance to proteases, thus improving the stability of the CAR in vivo.

[0378] In some aspects, an IgG3 hinge derived CAR spacer of the present disclosure comprises, consists, or consist essentially of a sequence disclosed in TABLE 11.

TABLE 11
IgG3 derived spacers

| Length | SEQ ID | Length | SEQ ID | Length | SEQ ID |
|---|---|---|---|---|---|
| 62 | 2813 | 61 | 2814-2815 | 60 | 2816-2818 |
| 59 | 2819-2822 | 58 | 2823-2827 | 57 | 2828-2833 |
| 56 | 2834-2840 | 55 | 2841-2848 | 54 | 2849-2857 |
| 53 | 2858-2867 | 52 | 2868-2878 | 51 | 2879-2890 |
| 50 | 2891-2903 | 49 | 2904-2917 | 48 | 2918-2932 |
| 47 | 2933-2948 | 46 | 2949-2965 | 45 | 2966-2983 |
| 44 | 2984-3002 | 43 | 3003-3022 | 42 | 3023-3043 |
| 41 | 3044-3065 | 40 | 3066-3088 | 39 | 3089-3112 |
| 38 | 3113-3137 | 37 | 3138-3163 | 36 | 3164-3190 |
| 35 | 3191-3218 | 34 | 3219-3247 | 33 | 3248-3277 |
| 32 | 3278-3308 | 31 | 3309-3340 | 30 | 3341-3373 |
| 29 | 3374-3407 | 28 | 3408-3442 | 27 | 3443-3478 |
| 26 | 3479-3515 | 25 | 3516-3553 | 24 | 3554-3592 |
| 23 | 3593-3632 | 22 | 3633-3673 | 21 | 3674-3715 |
| 20 | 3716-3758 | 19 | 3759-3802 | 18 | 3803-3847 |
| 17 | 3848-3893 | 16 | 3894-3940 | 15 | 3941-3988 |
| 14 | 3989-4037 | 13 | 4038-4087 | 12 | 4088-4138 |
| 11 | 4139-4190 | 10 | 4191-4243 | 9 | 4244-4297 |
| 8 | 4298-4352 | 7 | 4755-4810 | | |

[0379] In some aspects, the IgG3 hinge derived CAR spacer comprises an amino acid sequence having at least about 70%, at least about 75%, at least about 80%, at least about 85%, at least about 90%, at least about 95%, at least about 96%, at least about 97%, at least about 98%, at least about 99%, or about 100% sequence identity to a sequence selected from the group consisting of SEQ ID NO: 4833; SEQ ID NO: 4834; SEQ ID NO: 4835; SEQ ID NO: 4836; SEQ ID NO: 4837; SEQ ID NO: 4838; SEQ ID NO: 4841; and any combination thereof.

[0380] In some aspects, the IgG3 hinge derived CAR spacer comprises an amino acid sequence having at least about 70%, at least about 75%, at least about 80%, at least about 85%, at least about 90%, at least about 95%, at least about 96%, at least about 97%, at least about 98%, at least about 99%, or about 100% sequence identity to the sequence set forth in SEQ ID NO: 4833.

[0381] In some aspects, the IgG3 hinge derived CAR spacer comprises an amino acid sequence having at least about 70%, at least about 75%, at least about 80%, at least about 85%, at least about 90%, at least about 95%, at least about 96%, at least about 97%, at least about 98%, at least about 99%, or about 100% sequence identity to the sequence set forth in SEQ ID NO: 4834.

[0382] In some aspects, the IgG3 hinge derived CAR spacer comprises an amino acid sequence having at least about 70%, at least about 75%, at least about 80%, at least about 85%, at least about 90%, at least about 95%, at least about 96%, at least about 97%, at least about 98%, at least about 99%, or about 100% sequence identity to the sequence set forth in SEQ ID NO: 4835.

[0383] In some aspects, the IgG3 hinge derived CAR spacer comprises an amino acid sequence having at least about 70%, at least about 75%, at least about 80%, at least about 85%, at least about 90%, at least about 95%, at least about 96%, at least about 97%, at least about 98%, at least about 99%, or about 100% sequence identity to the sequence set forth in SEQ ID NO: 4836.

[0384] In some aspects, the IgG3 hinge derived CAR spacer comprises an amino acid sequence having at least about 70%, at least about 75%, at least about 80%, at least about 85%, at least about 90%, at least about 95%, at least about 96%, at least about 97%, at least about 98%, at least about 99%, or about 100% sequence identity to the sequence set forth in SEQ ID NO: 4837.

[0385] In some aspects, the IgG3 hinge derived CAR spacer comprises an amino acid sequence having at least about 70%, at least about 75%, at least about 80%, at least about 85%, at least about 90%, at least about 95%, at least about 96%, at least about 97%, at least about 98%, at least about 99%, or about 100% sequence identity to the sequence set forth in SEQ ID NO: 4838.

[0386] In some aspects, the IgG3 hinge derived CAR spacer comprises an amino acid sequence having at least about 70%, at least about 75%, at least about 80%, at least about 85%, at least about 90%, at least about 95%, at least about 96%, at least about 97%, at least about 98%, at least about 99%, or about 100% sequence identity to the sequence set forth in SEQ ID NO: 4841.

[0387] In some aspects, the IgG3 hinge derived CAR spacer of the present disclosure comprises a sequence disclosed in TABLE 11 or anywhere in the disclosure, further comprising an N-terminal subsequence comprising 1, 2, 3, 4, or 5 IgG3 CH1 C-terminal domain amino acids from TABLE 12 covalently bound to the N-terminus of the IgG3 sequence from TABLE 11 or anywhere in the disclosure.

[0388] In some aspects, the IgG3 hinge derived CAR spacer of the present disclosure comprises a sequence disclosed in TABLE 11 or anywhere in the disclosure, further comprising a C-terminal subsequence comprising 1, 2, 3, 4, or 5 IgG3 CH2 N-terminal domain amino acids from TABLE 12 covalently bound to the C-terminus of the IgG3 sequence from TABLE 11 or anywhere in the disclosure.

[0389] In some aspects, the IgG3 hinge derived CAR spacer of the present disclosure comprises a sequence disclosed in TABLE 11 or anywhere in the disclosure, further comprising (i) an N-terminal subsequence comprising 1, 2, 3, 4, or 5 IgG3 CH1 C-terminal domain amino acids from TABLE 12 covalently bound to the N-terminus of the IgG3 sequence from TABLE 11 or anywhere in the disclosure, and (ii) a C-terminal subsequence comprising 1, 2, 3, 4, or 5 IgG3 CH2 N-terminal domain amino acids from TABLE 12 covalently bound to the C-terminus of the IgG3 sequence from TABLE 11 or anywhere in the disclosure.

[0390] IgG3 CH1 and CH2 sequences that can be appended to the N- and/or C-termini of the IgG3 hinge derived CAR spacer sequences of TABLE 11 or anywhere in the disclosure are presented in TABLE 12.

TABLE 12
IgG3. CH1 and CH2 optional N-terminal
CH1 sequences and C-terminal CH2 sequences
(sequences from Uniprot P01860 comprising
1 to 5 amino acids flanking the full
IgG3 hinge of SEQ ID NO: 2813)

| CH1 | | CH2 | |
|---|---|---|---|
| Length | Sequences | Length | Sequences |
| 1 | V | 1 | A |
| 2 | RV | 2 | AP |
| 3 | KRV | 3 | APE |
| 4 | DKRV | 4 | APEL |
| | (SEQ ID | | (SEQ ID |
| | NO: 4554) | | NO: 4534) |
| 5 | VDKRV | 5 | APELL |
| | (SEQ ID | | (SEQ ID |
| | NO: 4555) | | NO: 4535) |

[0391] As used herein, the term “IgG4 hinge” refers to the core plus upper hinge of a IgG4 hinge, i.e., the sequence set forth in SEQ ID NO:4353. In some aspects, the IgG4 hinge comprises also the lower hinge (APEFLGGP; SEQ ID NO:4556) or a subsequence thereof. In some aspects, the subsequence of the IgG4 lower hinge appended to the C-terminus of the IgG4 hinge of SEQ ID NO:4353 or an N-terminal truncation thereof (i.e., a fragment of SEQ ID NO:4353 in which one or more amino acid residues have been removed from its N-terminal region) is selected from the group consisting of A, AP, APE, APEF (SEQ ID NO: 4557), APEFL (SEQ ID NO:4558), APEFLG (SEQ ID NO:4559), APEFLGG (SEQ ID NO:4560), and APEFLGGP (SEQ ID NO:4556).

[0392] As used herein, the term “IgG4 hinge derived CAR spacer” comprises, e.g., a spacer comprising an IgG4 hinge of SEQ ID NO: 4353 (upper plus core hinge), an IgG4 hinge of SEQ ID NO: 4561 (upper hinge, core hinge, and lower hinge), fragments thereof, and variants thereof comprising 1, 2, 3, 4, 5 or more additional CH1 region and/or CH2 region amino acids. In some aspects, the term IgG4 derived CAR spacer refers to a subsequence of an IgG4 hinge of SEQ ID NO: 4561 (upper hinge, core hinge, and lower hinge), wherein the subsequence comprises 7, 8, 9, 10, 11, 12, 13, 14, 15, 16, 17, 18, 19, 20, 21, or 22 consecutive amino acids from the polypeptide sequence set forth in SEQ ID NO: 4561.

[0393] In some aspects, an IgG4 hinge derived CAR spacer comprises at least five, six, or seven consecutive amino acids of the sequence set forth in SEQ ID NO: 4353. In some aspects, the IgG4 hinge derived CAR spacer comprises an amino acid sequence having at least about 70%, at least about 75%, at least about 80%, at least about 85%, at least about 90%, at least about 95%, at least about 96%, at least about 97%, at least about 98%, at least about 99%, or about 100% sequence identity to the sequence set forth in SEQ ID NO: 4353.

[0394] In some aspects, a CAR comprising the IgG4 hinge derived spacer is capable of inducing an increased Interferon-γ level, e.g., at least 10%, at least about 20%, at least about 30%, at least about 40%, at least about 50%, at least about 60%, at least about 70%, at least about 80%, at least about 90%, at least about 100%, at least about 120%, at least about 150%, compared to a CAR comprising a reference spacer, e.g., a reference IgG4 spacer (e.g., a spacer of SEQ ID NO: 4911).

[0395] In some aspects, a CAR comprising the IgG4 hinge derived spacer is capable of inducing an increased Interleukin-2 level, e.g., at least 10%, at least about 20%, at least about 30%, at least about 40%, at least about 50%, at least about 60%, at least about 70%, at least about 80%, at least about 90%, at least about 100%, at least about 120%, at least about 150%, compared to a CAR comprising a reference spacer, e.g., a reference IgG4 spacer (e.g., a spacer of SEQ ID NO: 4911).

[0396] In some aspects, the IgG4 hinge derived CAR spacer is not SEQ ID NO: 4987. In some aspects, the IgG4 hinge derived CAR spacer is not SEQ ID NO: 4988. In some aspects, the IgG4 hinge derived CAR spacer is not SEQ ID NO: 4989. In some aspects, the IgG4 hinge derived CAR spacer is not SEQ ID NO: 4990. In some aspects, the IgG4 hinge derived CAR spacer is not SEQ ID NO: 4991.

[0397] In some aspects, an “IgG4 hinge derived CAR spacer” of the present disclosure comprises, consists, or consist essentially of a sequence disclosed in TABLE 13.

TABLE 13
Ig G4 derived spacers

| Length | SEQ ID | Length | SEQ ID | Length | SEQ ID |
|---|---|---|---|---|---|
| 9 | 4353 | 11 | 4354-4355 | 10 | 4356-4358 |
| 8 | 4359-4362 | 8 | 4363-4367 | 7 | 4368-4373 |

[0398] In some aspects, the IgG4 hinge derived CAR spacer of the present disclosure comprises a sequence disclosed in TABLE 13 or anywhere in the disclosure, further comprising an N-terminal subsequence comprising 1, 2, 3, 4, or 5 IgG4 CH1 C-terminal domain amino acids from TABLE 14 covalently bound to the N-terminus of the IgG4 sequence from TABLE 13 or anywhere in the disclosure. In some aspects, the IgG4 hinge derived CAR spacer of the present disclosure comprises a sequence disclosed in TABLE 13 or anywhere in the disclosure, further comprising a C-terminal subsequence comprising 1, 2, 3, 4, or 5 IgG4 CH2 N-terminal domain amino acids from TABLE 14 covalently bound to the C-terminus of the IgG4 sequence from TABLE 13 or anywhere in the disclosure.

[0399] In some aspects, the IgG4 hinge derived CAR spacer of the present disclosure comprises a sequence disclosed in TABLE 13 or anywhere in the disclosure, further comprising (i) an N-terminal subsequence comprising 1, 2, 3, 4, or 5 IgG4 CH1 C-terminal domain amino acids from TABLE 14 covalently bound to the N-terminus of the IgG4 sequence from TABLE 13 or anywhere in the disclosure, and (ii) a C-terminal subsequence comprising 1, 2, 3, 4, or 5 IgG4 CH2 N-terminal domain amino acids from TABLE 14 covalently bound to the C-terminus of the IgG4 sequence from TABLE 13 or anywhere in the disclosure.

[0400] IgG4 CH1 and CH2 sequences that can be appended to the N- and/or C-termini of the IgG4 hinge derived CAR spacer sequences of TABLE 13 or anywhere in the disclosure are presented in TABLE 14.

TABLE 14
IgG4. CH1 and CH2 optional N-terminal
CH1 sequences and C-terminal CH2 sequences
(sequences from Uniprot P01861 comprising
1 to 5 amino acids flanking the full
IgG4 hinge of SEQ ID NO: 4353).

| CH1 | | CH2 | |
|---|---|---|---|
| Length | Sequence | Length | Sequence |
| 1 | V | 1 | A |
| 2 | RV | 2 | AP |
| 3 | KRV | 3 | APE |
| 4 | DKRV | 4 | APEF |
| | (SEQ ID | | (SEQ ID |
| | NO: 4554) | | NO: 4557) |
| 5 | VDKRV | 5 | APEFL |
| | (SEQ ID | | (SEQ ID |
| | NO: 4555) | | NO: 4558) |

### II.D. IgE Hinge Derived CAR Spacer

[0401] Immunoglobulin E (IgE) is a type of immunoglobulin (Ig) isotype comprising two heavy chains (ε chain) and two light chains, with the c chain containing 4 Ig-like constant domains (Cε1-Cε4). IgE is unique in that it lacks an actual hinge region and gets replaced by the Cε2 domain.

[0402] As used herein, the term “IgE hinge” refers to the sequence located between the C-terminus of Cε1 and the N-terminus of Cε2, i.e., the sequence located between amino acids 241 and 260. Accordingly, as defined herein, a full length “IgE hinge” would correspond to the sequence set forth in SEQ ID NO: 4374.

[0403] As used herein, the term “IgE hinge derived CAR spacer” comprises, e.g., a spacer comprising the sequence set forth in SEQ ID NO: 4374, fragments thereof, and variants thereof comprising 1, 2, 3, 4, 5 or more additional Cε1 region and/or Ca region amino acids.

[0404] In some aspects, an IgE hinge derived CAR spacer comprises at least five, six, or seven consecutive amino acids of the sequence set forth in SEQ ID NO: 4374. In some aspects, the IgE hinge derived CAR spacer comprises an amino acid sequence having at least about 70%, at least about 75%, at least about 80%, at least about 85%, at least about 90%, at least about 95%, at least about 96%, at least about 97%, at least about 98%, at least about 99%, or about 100% sequence identity to the sequence set forth in SEQ ID NO: 4374.

[0405] In some aspects, a CAR comprising the IgE hinge derived spacer is capable of inducing an increased Interferon-γ level, e.g., at least 10%, at least about 20%, at least about 30%, at least about 40%, at least about 50%, at least about 60%, at least about 70%, at least about 80%, at least about 90%, at least about 100%, at least about 120%, at least about 150%, compared to a CAR comprising a reference spacer, e.g., a reference IgG4 spacer (e.g., a spacer of SEQ ID NO: 4911).

[0406] In some aspects, a CAR comprising the IgE hinge derived spacer is capable of inducing an increased Interleukin-2 level, e.g., at least 10%, at least about 20%, at least about 30%, at least about 40%, at least about 50%, at least about 60%, at least about 70%, at least about 80%, at least about 90%, at least about 100%, at least about 120%, at least about 150%, compared to a CAR comprising a reference spacer, e.g., a reference IgG4 spacer (e.g., a spacer of SEQ ID NO: 4911).

[0407] In some aspects, a CAR comprising a IgE hinge derived spacer disclosed herein is capable of inducing an increased TNF-α level, e.g., at least 10%, at least about 20%, at least about 30%, at least about 40%, at least about 50%, at least about 60%, at least about 70%, at least about 80%, at least about 90%, at least about 100%, at least about 120%, at least about 150%, compared to a CAR comprising a reference spacer, e.g., a reference IgG4 spacer (e.g., a spacer of SEQ ID NO: 4911).

[0408] In some aspects, an IgE hinge derived CAR spacer of the present disclosure comprises, consists, or consist essentially of a sequence disclosed in TABLE 15.

TABLE 15
IgE derived spacers

| Length | SEQ ID | Length | SEQ ID | Length | SEQ ID |
|---|---|---|---|---|---|
| 19 | 4374 | 18 | 4375-4376 | 17 | 4377-4379 |
| 16 | 4380-4383 | 15 | 4384-4388 | 14 | 4389-4394 |
| 13 | 4395-4401 | 12 | 4402-4409 | 11 | 4410-4418 |
| 10 | 4419-4428 | 9 | 4429-4439 | 8 | 4440-4451 |
| 7 | 4452-4464 | | | | |

[0409] In some aspects, the IgE hinge derived CAR spacer comprises an amino acid sequence having at least about 70%, at least about 75%, at least about 80%, at least about 85%, at least about 90%, at least about 95%, at least about 96%, at least about 97%, at least about 98%, at least about 99%, or about 100% sequence identity to the sequence set forth in SEQ ID NO: 4856.

[0410] In some aspects, the IgE hinge derived CAR spacer of the present disclosure comprises a sequence disclosed in TABLE 15 or anywhere in the disclosure, further comprising an N-terminal subsequence comprising 1, 2, 3, 4, or 5 IgE Cε1 C-terminal domain amino acids from TABLE 16 covalently bound to the N-terminus of the IgE sequence from TABLE 15 or anywhere in the disclosure.

[0411] In some aspects, the IgE hinge derived CAR spacer of the present disclosure comprises a sequence disclosed in TABLE 15 or anywhere in the disclosure, further comprising a C-terminal subsequence comprising 1, 2, 3, 4, or 5 IgE Cε2 N-terminal domain amino acids from TABLE 16 covalently bound to the C-terminus of the IgE sequence from TABLE 15 or anywhere in the disclosure.

[0412] In some aspects, the IgE hinge derived CAR spacer of the present disclosure comprises a sequence disclosed in TABLE 15 or anywhere in the disclosure, further comprising (i) an N-terminal subsequence comprising 1, 2, 3, 4, or 5 IgE Cε1 C-terminal domain amino acids from TABLE 16 covalently bound to the N-terminus of the IgE sequence from TABLE 15 or anywhere in the disclosure, and (ii) a C-terminal subsequence comprising 1, 2, 3, 4, or 5 IgE Cε2 N-terminal domain amino acids from TABLE 16 covalently bound to the C-terminus of the IgE sequence from TABLE 15 or anywhere in the disclosure.

[0413] IgE Cε1 and Cε2 sequences that can be appended to the N- and/or C-termini of the IgE hinge derived CAR spacer sequences of TABLE 15 or anywhere in the disclosure are presented in TABLE 16.

TABLE 16
IgE. Cϵ1 and Cϵ2 optional N-terminal
Cϵ1 sequences and C-terminal Cϵ2 sequences
(sequences from Uniprot P01854 comprising 1
to 5 amino acids flanking the full IgGE
hinge of SEQ ID NO: 4374).

| Cϵ1 | | Cϵ2 | |
|---|---|---|---|
| Length | Sequences | Length | Sequences |
| 1 | D | 1 | K |
| 2 | TD | 2 | KI |
| 3 | STD | 3 | KIL |
| 4 | SSTD | 4 | KILQ |
| | (SEQ ID | | (SEQ ID |
| | NO: 4562) | | NO: 4564) |
| 5 | PSSTD | 5 | KILQS |
| | (SEQ ID | | (SEQ ID |
| | NO: 4563) | | NO: 4565) |

[0414] For simplicity, the IgE Cε1 region is considered a CH1 region, and the IgE Cε2 region is considered a CH2 region. Accordingly, references to a CH1 of IgM throughout the specification refer to IgE Cε1. Similarly, references to a CH2 of IgE throughout the specification refer to IgE Cε2.

### II.E. IgM Hinge Derived CAR Spacer

[0415] Immunoglobulin M (IgM) is the largest antibody, and it is the first antibody to appear in the response to initial exposure to an antigen. IgM includes light chains and heavy chains. The light chain (λ or78 ) is a protein of ˜220 amino acids, composed of a variable domain, VL (a segment of approximately 110 amino acids), and a constant domain, CL (also approximately 110 amino acids long). The μ heavy chain of IgM is a protein of ˜576 amino acids, and includes a variable domain (VH ˜110 amino acids), four distinct constant region domains (Cμ1, Cμ2, Cμ3, Cμ4, each ˜110 amino acids) and a “tailpiece” of ˜20 amino acids. Cμ1 and Cμ2 are connected by the connector sequence set forth in SEQ ID NO:4727.

[0416] For the purposes of the present the disclosure, the term “IgM hinge” is defined as an extended sequence surrounding the Cμ1-Cμ2 connector. Accordingly, as defined herein, a full length “IgM hinge” of the present disclosure would correspond to the sequence set forth in SEQ ID NO: 4465.

[0417] As used herein, the term “IgM hinge derived CAR spacer” comprises, e.g., a spacer comprising the sequence set forth in SEQ ID NO: 4465, fragments thereof, and variants thereof comprising 1, 2, 3, 4, 5 or more additional Cμ1 region and/or Cμ1 region amino acids. In some aspects, the IgM hinge derived CAR spacer is a Cμ1-Cμ2 connector having the sequence set forth in SEQ ID NO:4727.

[0418] In some aspects, an IgM hinge derived CAR spacer comprises at least five, six, or seven consecutive amino acids of the sequence set forth in SEQ ID NO: 4465. In some aspects, the IgM hinge derived CAR spacer comprises an amino acid sequence having at least about 70%, at least about 75%, at least about 80%, at least about 85%, at least about 90%, at least about 95%, at least about 96%, at least about 97%, at least about 98%, at least about 99%, or about 100% sequence identity to the sequence set forth in SEQ ID NO: 4465.

[0419] In some aspects, a CAR comprising the IgM hinge derived spacer is capable of inducing an increased Interferon-γ level, e.g., at least 10%, at least about 20%, at least about 30%, at least about 40%, at least about 50%, at least about 60%, at least about 70%, at least about 80%, at least about 90%, at least about 100%, at least about 120%, at least about 150%, compared to a CAR comprising a reference spacer, e.g., a reference IgG4 spacer (e.g., a spacer of SEQ ID NO: 4911).

[0420] In some aspects, a CAR comprising the IgM hinge derived spacer is capable of inducing an increased Interleukin-2 level, e.g., at least 10%, at least about 20%, at least about 30%, at least about 40%, at least about 50%, at least about 60%, at least about 70%, at least about 80%, at least about 90%, at least about 100%, at least about 120%, at least about 150%, compared to a CAR comprising a reference spacer, e.g., a reference IgG4 spacer (e.g., a spacer of SEQ ID NO: 4911).

[0421] In some aspects, a CAR comprising the IgM hinge derived spacer is capable of inducing an increased TNF-α level, e.g., at least 10%, at least about 20%, at least about 30%, at least about 40%, at least about 50%, at least about 60%, at least about 70%, at least about 80%, at least about 90%, at least about 100%, at least about 120%, at least about 150%, compared to a CAR comprising a reference spacer, e.g., a reference IgG4 spacer (e.g., a spacer of SEQ ID NO: 4911).

[0422] In some aspects, an IgM hinge derived CAR spacer of the present disclosure comprises, consists, or consist essentially of a sequence disclosed in TABLE 17.

TABLE 17
IgM derived spacers

| Length | SEQ ID | Length | SEQ ID | Length | SEQ ID |
|---|---|---|---|---|---|
| 26 | 4465 | 25 | 2783-2784 | 24 | 2785-2787 |
| 23 | 2788-2791 | 22 | 2792-2796 | 21 | 2797-2802 |
| 20 | 2803-2809 | 19 | 2810-2812, | 18 | 4571-4579 |
| | | | 4566-4570 | | |
| 17 | 4580-4589 | 16 | 4590-4600 | 15 | 4601-4612 |
| 14 | 4613-4625 | 13 | 4626-4639 | 12 | 4640-4654 |
| 11 | 4655-4670 | 10 | 4671-4687 | 9 | 4688-4705 |
| 8 | 4706-4724 | 7 | 4725-4744 | | |

[0423] In some aspects, the IgM hinge derived CAR spacer comprises an amino acid sequence having at least about 70%, at least about 75%, at least about 80%, at least about 85%, at least about 90%, at least about 95%, at least about 96%, at least about 97%, at least about 98%, at least about 99%, or about 100% sequence identity to a sequence selected from the group consisting of SEQ ID NO: 4857; SEQ ID NO: 4858; SEQ ID NO: 4859; and any combination thereof.

[0424] In some aspects, the IgM hinge derived CAR spacer comprises an amino acid sequence having at least about 70%, at least about 75%, at least about 80%, at least about 85%, at least about 90%, at least about 95%, at least about 96%, at least about 97%, at least about 98%, at least about 99%, or about 100% sequence identity to the sequence set forth in SEQ ID NO: 4857.

[0425] In some aspects, the IgM hinge derived CAR spacer comprises an amino acid sequence having at least about 70%, at least about 75%, at least about 80%, at least about 85%, at least about 90%, at least about 95%, at least about 96%, at least about 97%, at least about 98%, at least about 99%, or about 100% sequence identity to the sequence set forth in SEQ ID NO: 4858.

[0426] In some aspects, the IgM hinge derived CAR spacer comprises an amino acid sequence having at least about 70%, at least about 75%, at least about 80%, at least about 85%, at least about 90%, at least about 95%, at least about 96%, at least about 97%, at least about 98%, at least about 99%, or about 100% sequence identity to the sequence set forth in SEQ ID NO: 4859.

[0427] In some aspects, the IgM hinge derived CAR spacer of the present disclosure comprises a sequence disclosed in TABLE 17 or anywhere in the disclosure, further comprising an N-terminal subsequence comprising 1, 2, 3, 4, or 5 IgM Cμ1 C-terminal domain amino acids from TABLE 18 covalently bound to the N-terminus of the IgM sequence from TABLE 17 or anywhere in the disclosure.

[0428] In some aspects, the IgM hinge derived CAR spacer of the present disclosure comprises a sequence disclosed in TABLE 17 or anywhere in the disclosure, further comprising a C-terminal subsequence comprising 1, 2, 3, 4, or 5 IgM Cμ2 N-terminal domain amino acids from TABLE 18 covalently bound to the C-terminus of the IgM sequence from TABLE 17 or anywhere in the disclosure.

[0429] In some aspects, the IgM hinge derived CAR spacer of the present disclosure comprises a sequence disclosed in TABLE 17 or anywhere in the disclosure, further comprising (i) an N-terminal subsequence comprising 1, 2, 3, 4, or 5 IgN Cμ1 C-terminal domain amino acids from TABLE 18 covalently bound to the N-terminus of the IgM sequence from TABLE 17 or anywhere in the disclosure, and (ii) a C-terminal subsequence comprising 1, 2, 3, 4, or 5 IgM Cμ2 N-terminal domain amino acids from TABLE 18 covalently bound to the C-terminus of the IgM sequence from TABLE 17 or anywhere in the disclosure.

[0430] IgM Cμ1 and Cμ2 sequences that can be appended to the N- and/or C-termini of the IgM hinge derived CAR spacer sequences of TABLE 17 or anywhere in the disclosure are presented in TABLE 18.

TABLE 18
IgM. Cμ1 and Cμ2 optional N-terminal
Cμ1 sequences and C-terminal Cμ2 sequences
(sequences from Uniprot P01871 comprising 1
to 5 amino acids flanking the full IgM hinge
of SEQ ID NO: 4465).

| Cμ1 | | Cμ2 | |
|---|---|---|---|
| Length | Sequences | Length | Sequences |
| 1 | V | 1 | R |
| 2 | NV | 2 | RK |
| 3 | KNV | 3 | RKS |
| 4 | EKNV | 4 | RKSK |
| | (SEQ ID | | (SEQ ID |
| | NO: 4745) | | NO: 4747) |
| 5 | KEKNV | 5 | RKSKL |
| | (SEQ ID | | (SEQ ID |
| | NO: 4746) | | NO: 4748) |

[0431] For simplicity, the IgM Cμ1 region is considered a CH1 region, and the IgM Cμ2 region is considered a CH2 region. Accordingly, references to a CH1 of IgM throughout the specification refer to IgM Cμ1. Similarly, references to a CH2 of IgM throughout the specification refer to IgM Cμ2.

[0432] In some aspects, a CAR spacer of the present disclosure comprises a sequence set forth in TABLES 1, 3, 5, 7, 9A, 9B, 11, 13, 15, 17, or a combination thereof. In some aspects, the CAR spacer of the present disclosure comprises a sequence set forth in TABLES 1, 3, 5, 7, 9A, 9B, 11, 13, 15, 17, or a combination thereof and further comprises an N-terminal sequence set forth in TABLES 2, 4, 6, 8, 10A, 10B, 12, 14, 16, 18, or a combination thereof. In some aspects, the CAR spacer of the present disclosure comprises a sequence set forth in TABLES 1, 3, 5, 7, 9A, 9B, 11, 13, 15, 17 or a combination thereof and further comprises a C-terminal sequence set form in TABLES 2, 4, 6, 8, 10A, 10B, 12, 14, 16, 18, or a combination thereof. In some aspects, the CAR spacer of the present disclosure comprises a sequence set forth in TABLES 1, 3, 5, 7, 9A, 9B, 11, 13, 15, 17, or a combination thereof and further comprises (i) an N-terminal sequence set forth in TABLES 2, 4, 6, 8, 10A, 10B, 12, 14, 16, 18, or a combination thereof, and (ii) a C-terminal sequence set form in TABLES 2, 4, 6, 8, 10A, 10B, 12, 14, 16, 18, or a combination thereof.

[0433] In some aspects, a CAR spacer of the present disclosure is 7, 8, 9, 10, 11, 12, 13, 14, 15, 16, 17, 18, 19, 20, 21, 22, 23, 24, 25, 26, 27, 28, 29, 30, 31, 32, 33, 34, 35, 36, 37, 38, 39, 40, 41, 42, 43, 44, 45, 46, 47, 48, 49, 50, 51, 52, 53, 54, 55, 56, 57, 58, 59, 60, 61, 62, 63, 64, 65, 66, 67, 68, 69, 70, 71, 72, 73, 74, 75, 76, 77, 78, 79, 80, 81, 82, 83, 84, 85, 86, 87, 88, 89, 90, 91, 92, 93, 94, 95, 96, 97, 98, 99, 100, 101, 102, 103, 104, 105, 106, 107, 108, 109, 110, 111, 112, 113, 114, 115, 116, 117, 118, 119, 120, 121, 122, 123, 124, 125, 126, 127, 128, 129, 130, 131, 132, 133, 134, 135, 136, 137, 138, 139, 140, 141, 142, 143, 144, 145, 146, 147, 148, 149, 150, 151, 152, 153, 154, 155, 156, 157, 158, 159, 160, 161, 162, 163, 164, 165, 166, 167, 168, 169, 170, 171, 172, 173, 174, 175, 176, 177, 178, 179, 180, 181, 182, 183, 184, 185, 186, 187, 188, 189, 190, 191, 192, 193, 194, 195, 196, 197, 198, 199, 200, 201, 202, 203, 204, 205, 206, 207, 208, 209, 210, 211, 212, 213, 214, 215, 216, 217, 218, 219, 220, 221, 222, 223, 224, 225, 226, 227, 228, 229, 230, 231, 232, 233, 234, 235, 236, 237, 238, 239, 240, 241, 242, 243, 244, 245, 246, 247, 248, 249, 250, 251, 252, 253, 254, 255, 256, 257, 258, 259, 260, 261, 262, 263, 264, 265, 266, 267, 268, 269, 270, 271, 272, 273, 274, 275, 276, 277, 278, 279, 280, 281, 282, 283, 284, 285, 286, 287, 288, 289, 290, 291, 292, 293, 294, 295, 296, 297, 298, 299, 300, 301, 302, 303, 304, 305, 306, 307, 308, 309, 310, 311, 312, 313, 314, 315, 316, 317, 318, 319, 320, 321, 322, 323, 324, 325, 326, 327, 328, 329, 330, 331, 332, 333, 334, 335, 336, 337, 338, 339, 340, 341, 342, 343, 344, 345, 346, 347, 348, 349, 350, 351, 352, 353, 354, 355, 356, 357, 358, 359, 360, 361, 362, 363, 364, 365, 366, 367, 368, 369, 370, 371, 372, 373, 374, 375, 376, 377, 378, 379, 380, 381, 382, 383, 384, 385, 386, 387, 388, 389, 390, 391, 392, 393, 394, 395, 396, 397, 398, 399, or 400 amino acids in length.

[0434] In some aspects, a CAR spacer of the present disclosure is less that about 400, less than about 390, less than about 385, less than about 380, less than about 375, less than about 370, less than about 365, less than about 360, less than about 355, less than about 350, less than about 345, less than about 340, less than about 335, less than about 330, less than about 325, less than about 320, less than about 315, less than about 310, less than about 305, less than about 300, less than about 295, less than about 290, less than about 285, less than about 280, less than about 275, less than about 270, less than about 265, less than about 260, less than about 255, less than about 250, less than about 245, less than about 240, less than about 235, less than about 230, less than about 225, less than about 220, less than about 215, less than about 210, less than about 205, less than about 200, less than about 195, less than about 190, less than about 185, less than about 180, less than about 175, less than about 170, less than about 165, less than about 160, less than about 155, less than about 150, less than about 145, less than about 140, less than about 135, less than about 130, less than about 125, less than about 120, less than about 115, less than about 110, less than about 105, less than about 100, less than about 95, less than about 90, less than about 85, less than about 80, less than about 75, less than about 70, less than about 65, less than about 60, less than about 55, less than about 50, less than about 45, less than about 40, less than about 35, less than about 30, less than about 25, less than about 20, less than about 15, less than about 10, or less than about 5 amino acids in length.

[0435] In some aspects, a CAR spacer of the present disclosure is between 4 and 8, between 4 and 9, between 4 and 10, between 5 and 8, between 5 and 9, between 5 and 10, between 4 and 12, between 4 and 13, between 4 and 14, between 4 and 15, between 4 and 16, between 5 and 14, between 5 and 15, between 5 and 16, between 6 and 12, between 6 and 13, between 6 and 14, between 6 and 15, between 6 and 16, between 7 and 9, between 7 and 10, between 7 and 11, between 7 and 12, between 7 and 13, between 7 and 14, between 7 and 15, between 7 and 16, between 10 and 15, between 15 and 20, between 20 and 25, between 25 and 30, between 30 and 35, between 35 and 40, between 40 and 45, between 45 and 50, between 50 and 55, between 55 and 60, between 60 and 65, between 65 and 70, between 70 and 75, between 75 and 80, between 80 and 85, between 85 and 90, between 90 and 95, between 95 and 100, between 100 and 105, between 105 and 110, between 110 and 115, between 115 and 120, between 120 and 125, between 125 and 130, between 130 and 135, between 135 and 140, between 140 and 145, between 145 and 150, between 150 and 155, between 155 and 160, between 160 and 165, between 165 and 170, between 170 and 175, between 175 and 180, between 180 and 185, between 185 and 190, between 190 and 195, between 195 and 200 amino acids in length.

[0436] In some aspects, a CAR spacer of the present disclosure is between about 400 and about 390, between 390 and about 380, between about 380 and about 370, between about 370 and about 360, between about 360 and about 350, between about 350 and about 340, between about 340 and about 330, between about 330 and about 320, between about 320 and about 310, between about 310 and about 300, between about 300 and about 290, between about 290 and about 280, between about 280 and about 270, between about 270 and about 260, between about 260 and about 250, between about 250 and about 240, between about 240 and about 230, between about 230 and about 220, between about 220 and about 210, between about 210 and about 200, between about 200 and about 190, between about 190 and about 180, between about 180 and about 170, between about 170 and about 160, between about 160 and about 150, between about 150 and about 140, between about 140 and about 130, between about 130 and about 120, between about 120 and about 110, between about 110 and about 100, between about 100 and about 90, between about 90 and about 80, between about 80 and about 70, between about 70 and about 60, between about 60 and about 50, between about 50 and about 40, between 40 and about 30, between about 30 and about 20, or between about 20 and about 10 amino acids in length.

[0437] In some aspects, a CAR spacer of the present disclosure is between about 400 and about 380, between about 380 and about 360, between about 360 and about 340, between about 340 and about 320, between about 320 and about 300, between about 300 and about 280, between about 280 and about 260, between about 260 and about 240, between about 240 and 220, between about 220 and about 200, between about 200 and about 180, between about 180 and about 160, between about 160 and about 140, between about 120 and about 100, between about 100 and about 80, between about 80 and about 60, between about 60 and about 40, between about 40 and 20, between about 20 and about 10 amino acids in length.

[0438] In some aspects, a CAR spacer of the present disclosure is between about 400 and about 350, between about 350 and about 300, between about 300 and about 250, between about 250 and 200, between about 200 and about 150, between about 150 and about 100, between 100 and about 50, between 50 and about 1 amino acids in length.

[0439] In some aspects, a CAR spacer of the present disclosure is between about 400 and about 300, between about 300 and about 200, between about 200 and about 100, or between about 100 and about 1 amino acids in length.

[0440] In some aspects, a CAR spacer of the present disclosure, e.g., a CAR spacer disclosed in TABLES 1, 3, 5, 7, 9A, 9B, 11, 13, 15, or 17, is about 5, about 10, about 15, about 20, about 25, about 30, about 35, about 40, about 45, about 50, about 55, about 60, about 65, about 70, about 75, about 80, about 85, about 90, about 95, about 100, about 105, about 110, about 115, about 120, about 125, about 130, about 135, about 140, about 145, about 150, about 155, about 160, about 165, about 170, about 175, about 180, about 185, about 190, about 195, about 200, about 205, about 210, about 215, about 220, about 225, about 230, about 235, about 240, about 245, or about 250 angstrom in length.

[0441] In some aspects, a CAR spacer of the present disclosure, e.g., a CAR spacer disclosed in TABLES 1, 3, 5, 7, 9A, 9B, 11, 13, 15, or 17, is between about 5 and about 10, between about 10 and about 15, between about 15 and about 20, between about 20 and about 25, between about 25 and about 30, between about 30 and about 35, between about 35 and about 40, between about 40 and about 45, between about 45 and about 50, between about 50 and about 55, between about 55 and about 60, between about 60 and about 65, between about 65 and about 70, between about 70 and about 75, between about 75 and about 80, between about 80 and about 85, between about 85 and about 90, between about 90 and about 95, between about 95 and about 100, between about 100 and about 105, between about 105 and about 110, between about 110 and about 115, between about 115 and about 120, between about 120 and about 125, between about 125 and about 130, between about 130 and about 135, between about 135 and about 140, between about 140 and about 145, between about 145 and about 150, between about 150 and about 155, between about 155 and about 160, between about 160 and about 165, between about 165 and 170, between about 170 and about 175, between about 175 and about 180, between about 180 and about 185, between about 185 and about 190, between about 190 and about 195, between about 195 and about 200, between about 200 and about 205, between about 205 and about 210, between about 210 and about 215, between about 215 and about 220, between about 220 and about 225, between about 225 and about 230, between about 230 and about 235, between about 235 and about 240, between about 240 and about 245, or about between about 245 and about 250 angstrom in length.

[0442] In some aspects, a CAR spacer of the present disclosure, e.g., a CAR spacer disclosed in TABLES 1, 3, 5, 7, 9A, 9B, 11, 13, 15, or 17, is between about 10 and about 20, between about 20 and about 30, between about 30 and about 40, between about 40 and about 50, between about 50 and about 60, between about 60 and about 70, between about 70 and about 80, between about 80 and about 90, between about 90 and about 100, between about 100 and about 110, between about 110 and about 120, between about 120 and about 130, between about 130 and about 140, between about 140 and about 150, between about 150 and about 160, between about 160 and about 170, between about 170 and about 180, between about 180 and about 190, between about 190 and about 200, between about 200 and about 210, between about 210 and about 220, between about 220 and about 230, between about 230 and about 240, or about between about 245 and about 250 angstrom in length.

[0443] In some aspects, a CAR spacer of the present disclosure, e.g., a CAR spacer disclosed in TABLES 1, 3, 5, 7, 9A, 9B, 11, 13, 15, or 17, is between about 5 and about 25, between about 25 and about 50, between about 50 and about 75, between about 75 and about 100, between about 100 and about 125, between about 125 and about 150, between about 150 and about 175, between about 175 and about 200, between about 200 and about 225, or between about 225 and about 250 angstrom in length.

[0444] In some aspects, a CAR spacer of the present disclosure, e.g., a CAR spacer disclosed in TABLES 1, 3, 5, 7, 9A, 9B, 11, 13, 15, or 17, is less than about 250, less than about 240, less that about 230, less than about 220, less than about 210, less than about 200, less that about 190, less than about 180, less than about 170, less than about 160, less than about 150, less than about 140, less than about 130, less than about 120, less than about 110, less than about 100, less than about 90, less than about 80, less than about 70, less than about 60, less than about 50, less than about 40, less than about 30, less than about 20, or less than about 10 angstrom in length.

[0445] In some aspects, a CAR spacer of the present disclosure comprises an amino acid sequence having at least about 60%, at least about 65%, at least about 70%, at least about 75%, at least about 80%, at least about 85%, at least about 90%, at least about 95%, at least about 96%, at least about 97%, at least about 99%, or about 100% identity to a sequence set forth in TABLES 1, 3, 5, 7, 9A, 9B, 11, 13, 15 or 17.

[0446] In some aspects, a CAR spacer of the present disclosure comprises an amino acid sequence having 1, 2, 3, 4, 5, 6, 7, 8, 9, or 10 amino acid substitutions with respect to a sequence set forth in TABLES 1, 3, 5, 7, 9A, 9B, 11, 13, 15 or 17. In some aspects, cysteine amino acids are replaced with alanine. In some aspects, all the amino acid substitution are conservative amino acid substitutions. In some aspects, at least one amino acid substitution is conservative. In some aspects, at least one amino acid substitution is nonconservative.

[0447] In some aspects, a CAR spacer of the present disclosure comprises a sequence set forth in TABLES 1, 3, 5, 7, 9A, 9B, 11, 13, 15, or 17, wherein the N-terminal amino acid is the N-terminal amino acid of the naturally occurring hinge, and wherein the sequence of TABLES 1, 3, 5, 7, 9A, 9B, 11, 13, 15, or 17, is extended one, two, three, four, five, six, seven, eight, nine or ten amino acids into the corresponding CH1 region (i.e., the naturally occurring CH1 region). In other words the resulting CAR spacer of the present disclosure comprises one, two, three, four, five, six, seven, eight, nine or ten amino acids from the C-terminus of the corresponding CH1 region (e.g., the CH1 region of an IgD for a CAR spacer derived from a IgD hinge) appended to the N-terminus of the sequence of TABLES 1, 3, 5, 7, 9A, 9B, 11, 13, 15, or 17.

[0448] In some aspects, a CAR spacer of the present disclosure comprises a sequence set forth in TABLES 1, 3, 5, 7, 9A, 9B, 11, 13, 15, or 17, wherein the C-terminal amino acid is the C-terminal amino acid of the naturally occurring hinge, and wherein the sequence of TABLES 1, 3, 5, 7, 9A, 9B, 11, 13, 15, or 17, is extended one, two, three, four, five, six, seven, eight, nine or ten amino acids into the corresponding CH2 region (i.e., the naturally occurring CH2 region). In other words the resulting CAR spacer comprises one, two, three, four, five, six, seven, eight, nine or ten amino acids from the N-terminus of the corresponding CH2 region (e.g., the CH2 region of an IgD for a CAR spacer derived from a IgD hinge) appended to the C-terminus of the sequence of TABLES 1, 3, 5, 7, 9A, 9B, 11, 13, 15, or 17.

[0449] In some aspects, a CAR spacer of the present disclosure comprises a sequence set forth in TABLES 1, 3, 5, 7, 9A, 9B, 11, 13, 15, or 17, wherein (i) the N-terminal amino acid is the N-terminal amino acid of the naturally occurring hinge and the C-terminal amino acid is the C-terminal amino acid of the naturally occurring hinge, and (ii) the sequence of TABLES 1, 3, 5, 7, 9A, 9B, 11, 13, 15 or 17, is extended one, two, three, four, five, six, seven, eight, nine or ten amino acids into the corresponding CH1 region (i.e., the naturally occurring CH1 region) and extended one, two, three, four, five, six, seven, eight, nine or ten amino acids into the corresponding CH2 region (i.e., the naturally occurring CH2 region). In other words the resulting CAR spacer comprises one, two, three, four, five, six, seven, eight, nine or ten amino acids from the C-terminus of the corresponding CH1 region (e.g., the CH1 region of an IgD for a CAR spacer derived from a IgD hinge) appended to the N-terminus of the sequence of TABLES 1, 3, 5, 7, 9A, 9B, 11, 13, 15, or 17, and one, two, three, four, five, six, seven, eight, nine or ten amino acids from the N-terminus of the corresponding CH2 region (e.g., the CH2 region of an IgD for a CAR spacer derived from a IgD hinge) appended to the C-terminus of the sequence of TABLES 1, 3, 5, 7, 9A, 9B, 11, 13, 15, or 17.

[0450] In some specific aspects, a CAR spacer of the present disclosure comprises, consists, or consists essentially of a sequence set forth in FIG. 9. The table includes the sequences of exemplary spacers of the present disclosure, their SEQ ID NOs, length (including an optional flexible linker), Ig hinge source, and also the identifier (“Spacer” column) used for each hinge in the drawings and example section of this specification.

[0451] In some specific aspects, a CAR spacer of the present disclosure comprises, consists, or consists essentially of a sequence of an IgA1 hinge derived CAR spacer, e.g, Spacer 16 (SEQ ID NO: 4844), Spacer 17 (SEQ ID NO: 4845), Spacer 18 (SEQ ID NO: 4846), or Spacer 19 (SEQ ID NO: 4847), as shown in FIG. 9. In some aspects, the IgA1 hinge derived CAR spacer comprises a Gly-Ser linker, e.g., a linker of SEQ ID NO: 4818.

[0452] In some specific aspects, a CAR spacer of the present disclosure comprises, consists, or consists essentially of a sequence of an IgA2 hinge derived CAR spacer, e.g, Spacer 20 (SEQ ID NO: 4848), Spacer 21 (SEQ ID NO: 4849), Spacer 22 (SEQ ID NO: 4850), or Spacer 23 (SEQ ID NO:4851) as shown in FIG. 9. In some aspects, the IgA2 hinge derived CAR spacer comprises a Gly-Ser linker, e.g., a linker of SEQ ID NO: 4818 or 5088.

[0453] In some specific aspects, a CAR spacer of the present disclosure comprises, consists, or consists essentially of a sequence of an IgD hinge derived CAR spacer, e.g, Spacer 24 (SEQ ID NO: 4852), Spacer 25 (SEQ ID NO: 4853), Spacer 26 (SEQ ID NO: 4854), or Spacer 27 (SEQ ID NO: 4855) as shown in FIG. 9. In some aspects, the IgD hinge derived CAR spacer comprises a Gly-Ser linker, e.g., a linker of SEQ ID NO: 4818 or 5088.

[0454] In some specific aspects, a CAR spacer of the present disclosure comprises, consists, or consists essentially of a sequence of an IgE hinge derived CAR spacer, e.g, Spacer 28 (SEQ ID NO:4856) as shown in FIG. 9. In some aspects, the IgE hinge derived CAR spacer comprises a Gly-Ser linker, e.g., a linker of SEQ ID NO: 4818 or 5088.

[0455] In some specific aspects, a CAR spacer of the present disclosure comprises, consists, or consists essentially of a sequence of an IgG1 hinge derived CAR spacer, e.g, Spacer 11 (SEQ ID NO: 4840) or Spacer 10 (SEQ ID NO: 4839) as shown in FIG. 9. In some aspects, the IgG1 hinge derived CAR spacer comprises a Gly-Ser linker, e.g., a linker of SEQ ID NO: 4818 or 5088.

[0456] In some specific aspects, a CAR spacer of the present disclosure comprises, consists, or consists essentially of a sequence of an IgG2, e.g., a human IgG2 hinge, derived CAR spacer, e.g, Spacer 14 (SEQ ID NO:4842) as shown in FIG. 9. In some aspects, the IgG2 hinge derived CAR spacer comprises a Gly-Ser linker, e.g., a linker of SEQ ID NO: 4818 or 5088.

[0457] In some specific aspects, a CAR spacer of the present disclosure comprises, consists, or consists essentially of a sequence of an IgG2 hinge, e.g., a murine IgG2A hinge, derived CAR spacer, e.g, Spacer 1 (SEQ ID NO: 4830), Spacer 2 (SEQ ID NO:4831), Spacer 3 (SEQ ID NO:4832) as shown in FIG. 9. In some aspects, the IgG2 hinge derived CAR spacer comprises a Gly-Ser linker, e.g., a linker of SEQ ID NO: 4818 or 5088.

[0458] In some specific aspects, a CAR spacer of the present disclosure comprises, consists, or consists essentially of a sequence of an IgG2 hinge, e.g., a murine IgG2A hinge, derived CAR spacer, e.g, Spacer 1 (SEQ ID NO: 4830), Spacer 2 (SEQ ID NO:4831), Spacer 3 (SEQ ID NO:4832), as shown in FIG. 9, wherein the IgG2 hinge is a hinge region from IgG2A (Uniprot P01865). In some aspects, the CAR spacer comprises a 6-mer, 7-mer, 8-mer, 9-mer, 10-mer, 11-mer, 12-mer or 13-mer amino acid subsequence of a murine IgG2A hinge of SEQ ID NO: 4860 (EPRGPTIKPCPPC). In some aspects, the CAR spacer derived from the murine IgG2A hinge of SEQ ID NO: 4860, further comprises 1, 2, 3, 4, or 5 CH1 amino acids from the murine IgG2A upstream from the hinge sequence (i.e., a VDKKI sequence of SEQ ID NO:4861 or a subsequence thereof), and/or 1, 2, 3, 4, or 5 CH2 amino acids from the murine IgG2A downstream from the hinge sequence (i.e., a KCPAP sequence of SEQ ID NO:4862 or a subsequence thereof). In some aspects, the CAR spacer derived from the murine IgG2A hinge of SEQ ID NO:4860 comprises a KPCPPC (SEQ ID NO:4863) subsequence from the IgG2A hinge and a contiguous KPC subsequence of the CH2 region of murine IgG2A, i.e., the CAR spacer has the sequence of Spacer 1. In some aspects, an IgG2 hinge, e.g., a murine IgG2A hinge, derived CAR spacer comprises a Gly-Ser linker, e.g., a linker of SEQ ID NO: 4818 or 5088.

[0459] In some specific aspects, a CAR spacer of the present disclosure comprises, consists, or consists essentially of a sequence of an IgG3 hinge derived CAR spacer, e.g, Spacer 4 (SEQ ID NO: 4844), Spacer 5 (SEQ ID NO: 4834), Spacer 6 (SEQ ID NO: 4835), Spacer 7 (SEQ ID NO: 4836), Spacer 8 (SEQ ID NO: 4837), Spacer 9 (SEQ ID NO: 4838) or Spacer 13 (SEQ ID NO: 4841) as shown in FIG. 9. In some aspects, the IgG3 hinge derived CAR spacer comprises a Gly-Ser linker, e.g., a linker of SEQ ID NO: 4818 or 5088.

[0460] In some specific aspects, a CAR spacer of the present disclosure comprises, consists, or consists essentially of a sequence of an IgM hinge derived CAR spacer, e.g, Spacer 29 (SEQ ID NO:4857), Spacer 30 (SEQ ID NO:4858) or Spacer 31 (SEQ ID NO:4859) as shown in FIG. 9. In some aspects, the IgM hinge derived CAR spacer comprises a Gly-Ser linker, e.g., a linker of SEQ ID NO: 4818 or 5088.

[0461] In some aspects, a CAR spacer of the present disclosure has at least about 70%, at least about 75%, at least about 80%, at least about 85%, at least about 90%, at least about 95%, at least about 96%, at least about 97%, at least about 98%, or at least about 99% sequence identity to a sequence set forth in FIG. 9. In some aspects, a CAR spacer of the present disclosure comprises a sequence identical to any one of the sequences set forth in FIG. 9 except for one, 2, 3, 4, 5, 6, 7, 8, 9, or 10 amino acid substitutions. In some aspects, the amino acid substitutions are conservative amino acid substitutions. In some aspects, the amino acid substitution comprises at least one non-conservative amino acid substitution.

[0462] In some aspects, a CAR spacer of the present disclosure comprises a sequence of any of the spacers of SEQ ID NOS: 4830-4859 (Spacer 1 to 31) disclosed in FIG. 9, wherein the spacer sequence further comprises an optional flexible linker (e.g., the linker of SEQ ID NO:4818 or 5088 set forth in FIG. 9 and its legend). Thus, in some aspects, a CAR spacer of the present disclosure comprises a Spacer sequence disclosed in FIG. 9 and an optional C-terminal or N-terminal flexible linker. For example, in some aspects, a CAR spacer of the present disclosure comprises the sequence set forth in SEQ ID NO: 4882, i.e., Spacer 1 plus a C-terminal linker of SEQ ID NO:4818; the sequence set forth in SEQ ID NO:4883, i.e., Spacer 1 plus an N-terminal linker of SEQ ID NO:4818; or the sequence set forth in SEQ ID NO:4884, i.e., Spacer 1 plus both a C-terminal linker and an N-terminal linker of SEQ ID NO:4818. For example, in some aspects, a CAR spacer of the present disclosure comprises the sequence of Spacer 1 plus a C-terminal linker of SEQ ID NO:5088; the sequence of Spacer 1 plus an N-terminal linker of SEQ ID NO:5088; or the sequence of Spacer 1 plus both a C-terminal linker and an N-terminal linker of SEQ ID NO:5088. In some aspects, any optional flexible linkers (e.g., gly/ser rich linker) disclosed herein can be appended to the C-terminus and/or the N-terminus of any spacer sequence disclosed in FIG. 9.

[0463] In some aspects, a CAR spacer of the present disclosure comprises a functional fragment of a human immunoglobulin hinge region comprising:
[0464] (a) an internal subsequence of a hinge region of an IgA1, IgA2, IgD, IgE, IgG1, IgG2 (e.g., human IgG2 or murine IgG2A), IgG3, IgG4, or IgM (e.g., a hinge region from SEQ ID NOS: 4993-5002);
[0465] (b) a C-terminal subsequence of a hinge region IgA1, IgA2, IgD, IgE, IgG1, IgG2 (e.g., human IgG2 or murine IgG2A), IgG3, IgG4, or IgM (e.g., a hinge region from SEQ ID NOS: 4993-5002);
[0466] (c) an N-terminal subsequence of a hinge region IgA1, IgA2, IgD, IgE, IgG1, IgG2 (e.g., human IgG2 or murine IgG2A), IgG3, IgG4, or IgM (e.g., a hinge region from SEQ ID NOS: 4993-5002);
[0467] (d) a hinge region of an IgA1, IgA2, IgD, IgE, IgG1, IgG2 (e.g., human IgG2 or murine IgG2A), IgG3, IgG4, or IgM (e.g., a hinge region from SEQ ID NOS: 4993-5002) extended 1 to 10 amino acids towards the N-terminal CH1 domain and/or C-terminal CH2 domain;
[0468] (e) a subsequence of a hinge region of an IgA1, IgA2, IgD, IgE, IgG1, IgG2 (e.g., human IgG2 or murine IgG2A), IgG3, IgG4, or IgM (e.g., a hinge region from SEQ ID NOS: 4993-5002) extended 1 to 10 amino acids towards the N-terminal CH1 domain;
[0469] (f) a subsequence of a hinge region of an IgA1, IgA2, IgD, IgE, IgG1, IgG2 (e.g., human IgG2 or murine IgG2A), IgG3, IgG4, or IgM (e.g., a hinge region from SEQ ID NOS: 4993-5002) extended 1 to 10 amino acids towards the C-terminal CH2 domain;
[0470] (g) a sequence comprising 2 or more repeats of (a)-(f);
[0471] (h) a combination of (a)-(g) corresponding to the same hinge region;
[0472] (h) a combination of (a)-(g) corresponding to different hinge regions; or,
[0473] (i) any combination thereof.

[0474] In some aspects, the hinge region is a murine hinge region.

[0475] In some aspects, a CAR spacers disclosed herein comprises, consists essentially of, or consists of the sequence set forth in SEQ ID NO: 4831, which is capable of linking an antigen-binding domain that specifically binds to ROR1 with a transmembrane domain.

[0476] In some aspects, the present disclosure provides an anti-ROR1 CAR-expressing cell, e.g., CART, e.g., a cell expressing an anti-ROR1 CAR construct or encoded by a ROR1 binding CAR comprising a scFv, CDRs, or VH and VL chains, wherein the anti-ROR1 CAR comprises a CAR spacer of the present disclosure. An anti-ROR1 CAR-expressing cell, e.g., CART can be generated by engineering a ROR1 CAR that comprises a ROR1 binding domain and a CAR spacer of the present disclosure into a cell (e.g., a T cell or NK cell), e.g., for administration to a subject in need thereof.

[0477] In some aspects, the ROR1 CAR comprises a sequence set forth in SEQ ID NO: 5070 in which the spacer (subsequence between positions 268 and 281 set forth in SEQ ID NO:4867) has been substituted by a spacer sequence disclosed herein. In some aspects, the spacer sequence replacing the subsequence between positions 268 and 281 in SEQ ID NO:5070 is selected from the group consisting of SEQ ID NOS:4830 to 4859 (Spacer 1 to Spacer 31). In some aspects, the spacer sequence of SEQ ID NO:4830 to 4859 further comprises an optional N-terminal and/or C-terminal linker sequence of SEQ ID NO:4818. In some aspects, the subsequence between position 268 and 281 in in SEQ ID NO:5070 is replaced with Spacer 1 (SEQ ID NO:4830). In some aspects, the ROR1 CAR comprises a CAR sequence disclosed in TABLE 21. In some aspects, the ROR1 CAR-T comprises a CAR sequence disclosed in TABLE 21. In some aspects, the ROR1 CAR comprises a CAR sequence set forth in any of SEQ ID NOS: 5072, 5073, 5074, or 5075. In some aspects, the ROR1 CAR-T comprises a CAR sequence set forth in any of SEQ ID NOS: 5072, 5073, 5074, or 5075.

[0478] Non limiting exemplary ROR1-binding domains can be found at TABLE 19, e.g., R12 antibody. Accordingly, in some aspects, the ROR1 CAR comprises a binding moiety derived from antibodies R12, R11, or 2A2 (see TABLE 19). In some aspects, the ROR1 CAR comprises a binding moiety derived from the R12 antibody and a spacer disclosed herein, e.g., Spacer 1 or any of the spacers disclosed in FIG. 9. In some aspects, the ROR1 CAR comprises a binding moiety derived from the R11 antibody and a spacer disclosed herein, e.g., Spacer 1 or any of the spacers disclosed in FIG. 9. In some aspects, the ROR1 CAR comprises a binding moiety derived from the 2A2 antibody and a spacer disclosed herein, e.g., Spacer 1 or any of the spacers disclosed in FIG. 9.

[0479] In some aspects, the present disclosure provides an anti-CD19 CAR-expressing cell, e.g., CART, e.g., a cell expressing an anti-CD19 CAR construct or encoded by a CD19 binding CAR comprising a scFv, CDRs, or VH and VL chains, wherein the anti-CD19 CAR comprises a CAR spacer of the present disclosure. An anti-CD19 CAR-expressing cell, e.g., CART can be generated by engineering a CD19 CAR that comprises a CD19 binding domain and a CAR spacer of the present disclosure into a cell (e.g., a T cell or NK cell), e.g., for administration to a subject in need thereof.

[0480] In some aspects, the present disclosure provides an anti-CD19 CAR comprising a spacer disclosed herein. In some aspects, the FMC63 CAR comprises a sequence set forth in SEQ ID NO:5076 in which the spacer (subsequence from positions 266 to 277 set forth in SEQ ID NO:4876) has been substituted by a spacer sequence disclosed herein. In some aspects, the spacer sequence replacing the subsequence between positions 266 and 277 in SEQ ID NO:5076 is selected from the group consisting of SEQ ID NOS:4830 to 4859 (Spacer 1 to Spacer 31). In some aspects, the spacer sequence of SEQ ID NO:4830 to 4859 further comprises an optional N-terminal and/or C-terminal linker sequence of SEQ ID NO:4818. In some aspects, the subsequence between position 266 and 277 in SEQ ID NO:5076 is replaced with Spacer 1 (SEQ ID NO:4830). In some aspects, the anti-CD19 CAR comprises a CAR sequence disclosed in TABLE 23. In some aspects, the anti-CD19 CAR-T comprises a CAR sequence disclosed in TABLE 23. In some aspects, the anti-CD19 CAR comprises a CAR sequence set forth in any of SEQ ID NOS: 4918, 4919, 4920, 4921, 4922, 4923, 4924, or 4925. In some aspects, the anti-CD19 CAR comprises a CAR spacer sequence comprising, consisting, or consisting essentially of a sequence set forth in SEQ ID NOs: 4836, 4837, 4838, 4839, 4840, 4842, 4844, or 4856.

[0481] In some aspects, the present disclosure provides an anti-Her2 CAR-expressing cell, e.g., CAR-T, e.g., a cell expressing an anti-Her2 CAR construct or encoded by a Her2 binding CAR comprising a scFv, CDRs, or VH and VL chains, wherein the anti-Her2 CAR comprises a CAR spacer of the present disclosure. An anti-Her2 CAR-expressing cell, e.g., CART can be generated by engineering a Her2 CAR that comprises a Her2 binding domain and a CAR spacer of the present disclosure into a cell (e.g., a T cell or NK cell), e.g., for administration to a subject in need thereof.

[0482] In some aspects, the present disclosure provides an anti-Her2 CAR comprising a spacer disclosed herein. In some aspects, the anti-Her2 CAR comprises a CAR sequence disclosed in TABLE 24. In some aspects, the anti-Her2 CAR comprises a sequence set forth in SEQ ID NOS:5005, 5006, 5007 or 5008. In some aspects, the anti-Her2 CAR comprises a sequence set forth in SEQ ID NOS:5005, 5006, 5007 or 5008, in which the scFv linker sequence of SEQ ID NO: 5003 has been replaced with the scFv linker sequence of SEQ ID NO: 5004. In some aspects, the anti-Her2 CAR comprises a CAR spacer sequence comprising, consisting, or consisting essentially of a sequence set forth in SEQ ID NOs: 4835, 4836, 4837, or 4844.

[0483] In some aspects, the CAR (e.g., an anti-ROR1 CAR, an anti-CD19 CAR, or an anti-Her2 CAR disclosed herein) comprises an optional leader sequence (e.g., an optional leader sequence described herein), an extracellular antigen-binding domain, a CAR spacer of the present disclosure (e.g., a hinge region derived CAR spacer described herein), a transmembrane domain (e.g., transmembrane domain described herein), and an intracellular stimulatory domain (e.g., intracellular stimulatory domain described herein).

[0484] In some aspects, an exemplary CAR construct (e.g., an anti-ROR1 CAR, an anti-CD19 CAR or anti-Her2 CAR disclosed herein) comprises an optional leader sequence (e.g., a leader sequence described herein), an extracellular antigen-binding domain, a CAR spacer of the present disclosure (e.g., a hinge or hinge and constant region derived CAR spacer described herein), a transmembrane domain, an intracellular costimulatory domain (e.g., an intracellular costimulatory domain described herein) and an intracellular stimulatory domain.

[0485] In some aspects, the present disclosure encompasses a recombinant nucleic acid construct comprising a nucleic acid molecule encoding a CAR (e.g., an anti-ROR1 CAR, an anti-CD19 CAR, or an anti-Her2 CAR disclosed herein), wherein the nucleic acid molecule comprises the nucleic acid sequence encoding a binding domain (e.g., a ROR1-binding domain in an anti-ROR1 CAR of the present disclosure, or a CD19-binding domain in an anti-CD19 CAR disclosed herein, or a Her2-binding domain of an anti-Her2 CAR disclosed herein), e.g., that is contiguous with and in the same reading frame as a nucleic acid sequence encoding an intracellular signaling domain. An exemplary intracellular signaling domain that can be used in the CAR includes, but is not limited to, one or more intracellular signaling domains of, e.g., CD3-zeta, CD28, 4-1BB, and the like. In some aspects, the CAR (e.g., an anti-ROR1 CAR, an anti-CD19 CAR, or an anti-Her2 CAR disclosed herein) can comprise any combination of CD3-zeta, CD28, 4-1BB, and the like.

[0486] In some aspects, the binding domain (e.g., a ROR1-binding domain in an anti-ROR1 CAR of the present disclosure, or a CD19-binding domain in an anti-CD19 CAR disclosed herein, or a Her2-binding domain of an anti-Her2 CAR disclosed herein) is characterized by particular functional features or properties of an antibody or antigen-binding antibody fragment. For example, in some aspects, the portion of a CAR composition of the disclosure that comprises an antigen-binding domain specifically binds a human antigen or a fragment thereof (e.g., a human ROR1-binding domain in an anti-ROR1 CAR of the present disclosure, or a human CD19-binding domain in an anti-CD19 CAR disclosed herein, or a Her2-binding domain of an anti-Her2 CAR disclosed herein). In certain aspects, the scFv is contiguous with and in the same reading frame as a leader sequence.

[0487] In some aspects, the binding domain (e.g., a ROR1-binding domain in an anti-ROR1 CAR of the present disclosure, or a CD19-binding domain in an anti-CD19 CAR disclosed herein, or a Her2-binding domain of an anti-Her2 CAR disclosed herein) is a fragment, e.g., a single chain variable fragment (scFv). In some aspects, the binding domain (e.g., a ROR1-binding domain in an anti-ROR1 CAR of the present disclosure, or a CD19-binding domain in an anti-CD19 CAR disclosed herein, or a Her2-binding domain of an anti-Her2 CAR disclosed herein) is a Fv, a Fab, a (Fab′)₂, or a bi-functional (e.g. bi-specific) hybrid antibody (e.g., Lanzavecchia et al., Eur. J. Immunol. 17, 105 (1987)). In some aspects, the antibodies and fragments thereof of the disclosure, used to generate a CAR of the present disclosure, binds their target protein (e.g., ROR1, CD19 or Her2) or a fragment thereof with wild-type or enhanced affinity. In some instances, a human scFv used in a CAR of the present disclosure can be derived from a display library.

### Modular Ig Derived Spacers

[0488] The present disclosure also provide a polypeptide encoding a “modular CAR spacer,” i.e., a CAR spacer comprising several repetitions of a polypeptide unit. This specific type of CAR spacer of the present disclosure allows tailoring the length of a spacer to optimally position the CAR antigen-binding domain with respect to the epitope of a tumor antigen expressed on a target cell. The modular CAR spacers disclosed herein can be generated by concatenating two or more polypeptides disclosed herein (e.g., hinge region derived CAR spacers, loop region derived CAR spacers, or combinations thereof). In a particular aspect, the modular CAR can be generated by concatenating sequences derived from the IgG3 hinge region and/or polypeptide sequences comprising motifs identified in the IgG3 hinge region.

[0489] Accordingly, the present disclosure provides a polynucleotide encoding a CAR comprising (i) an antigen-binding domain that binds to an epitope on a tumor antigen expressed on a target cell; (ii) a transmembrane domain; (iii) an intracellular domain; and (iv) a modular CAR spacer of the present disclosure located between the antigen-binding domain and the transmembrane domain comprising an amino acid sequence derived from a human immunoglobulin hinge region or a functional fragment thereof, wherein the CAR spacer of the present disclosure comprises an amino acid sequence of formula C_{N}—(X₁PRX₂P)ₘ-[L-(X₁PRX₂P)]ₙ—C_{C} wherein (i) the modular CAR spacer is located between the ligand-binding domain and the transmembrane domain of the CAR; (ii) the modular CAR spacer has a length of at least 15 amino acids; (iii) m is an integer selected from 0 or 1; (iv) n is an integer between 1 to 20; (v) L is a linker polypeptide sequence; (vi) C_{N} is an optional N-terminal capping sequence; (vii) C_{C} is an optional C-terminal capping sequence; and, (viii) X₁ and X₂ are independently selected from cysteine, glycine, alanine, or serine.

[0490] In some aspects, the modular CAR spacer comprises two, three, four, five, or six X₁PRX₂P motifs. In some aspects, X₁PRX₂P comprises at least one cysteine. In some aspects X₁PRX₂P is SEQ ID NO: 4749 (CPRCP). In some aspects, L comprises a polypeptide of SEQ ID NO: 4185 or a fragment or variant thereof. In some aspects, when n>1, all L are identical. In some aspects, when n>1, at least one L is different from the other L. In some aspects C_{N} comprises a polypeptide of SEQ ID NO: 4088 or a fragment or variant thereof. In some aspects, C_{C} comprises a polypeptide of SEQ ID NO: 4453 or a fragment or variant thereof.

[0491] In some aspects, the modular CAR spacer comprises the sequence of formula (CPRCP)ₒ(EPKSCDTPPPCPRCP)ₚ, wherein o is an integer which is 0 or 1, and p is an integer which is 1, 2 or 3.

[0492] In some aspects, the modular CAR spacer comprises an amino acid sequence selected the group consisting of SEQ ID NOS: 2903; 2983; 3358; 3728; and, 3958.

[0493] In some aspects, the modular CAR spacer comprises a C_{C} capping sequence comprising a subsequence of the polypeptide of SEQ ID NO: 4453 or a fragment or variant thereof. In some aspects, the subsequence of the polypeptide of SEQ ID NO: 4453 is the N-terminal AP. In some aspects, the modular CAR spacer comprises an amino acid sequence selected from the group consisting of SEQ ID NOS: 4750; 4751; 4752; 4753; and, 4754.

[0494] In some aspects, the modular CAR spacer comprises a C_{N} capping sequence comprising a subsequence of the polypeptide of SEQ ID NO: 4088 or a fragment or variant thereof. In some aspects, the modular CAR spacer comprises the amino acid sequence of SEQ ID NO: 4811.

[0495] In some aspects, the present disclosure provides a polynucleotide encoding a CAR comprising (i) an antigen-binding domain that binds to an epitope on a tumor antigen expressed on a target cell; (ii) a transmembrane domain; (iii) an intracellular domain; and (iv) a modular CAR spacer located between the antigen-binding domain and the transmembrane domain comprising an amino acid sequence derived from a human immunoglobulin hinge region or a functional fragment thereof, wherein the spacer comprises an amino acid sequence of formula (EX₃KX₄X₅X₆X₇DTX₈X₉X₁₀TCPRCP)q (SEQ ID NO: 4812) wherein q is an integer between 1 and 10, and wherein: X₃ is L or P; X₄ is T or S; X₅ is P or C; X₆ is L, or none; X₇ is G, or none; X₈ is T or P; X₉ is H or P; and, X₁₀ is T or P.

[0496] The present disclosure also provides a polynucleotide encoding a CAR comprising (i) an antigen-binding domain that binds to an epitope on a tumor antigen expressed on a target cell; (ii) a transmembrane domain; (iii) an intracellular domain; and, (iv) a modular CAR spacer located between the antigen-binding domain and the transmembrane domain comprising an amino acid sequence derived from a human immunoglobulin hinge region or a functional fragment thereof, wherein the modular CAR spacer comprises at least one amino acid sequence A of SEQ ID NO: 4466 and/or at least one amino acid sequence B of SEQ ID NO: 4477, wherein the amino acid sequence of the CAR spacer corresponds, e.g., to the formula AB, ABB, ABBB, ABBBB, A, B, BA, AA, BAB, BAA, AAA, ABA, BBB, AABB, AAAB. In some aspects, the modules (sequence A and sequence B) are concatenated via an amino bond between the C-terminal amino acid in a module and the N-terminal amino acid in the following module.

[0497] In some aspects, the modular CAR spacer of the present disclosure corresponds to the formula {[A/B]−(L1)−[A/B]−(L2)]}n wherein A/B is an amino sequence A of SEQ ID NO: 4466 or an amino acid sequence B of SEQ ID NO: 4477; L1 and L2 are optional linkers (e.g., Gly-Ser linkers such as the linker of SEQ ID NO: 4818 or 5088); and, n is an integer between 1 and 100.

[0498] Exemplary modular CAR spacers derived from IgG3 comprising combination of sequence A set forth in SEQ ID NO: 4466 and/or sequence B set forth in SEQ ID NO: 4477, are set forth in SEQ ID NOs:4466-4518.

[0499] In some aspects, the L1 and/or L2 optional linker is a peptide linker. In some aspects, the L1 and/or L2 optional linker can comprise at least about two, at least about three, at least about four, at least about five, at least about 10, at least about 15, at least about 20, at least about 25, at least about 30, at least about 35, at least about 40, at least about 45, at least about 50, at least about 55, at least about 60, at least about 65, at least about 70, at least about 75, at least about 80, at least about 85, at least about 90, at least about 95, at least about 100, at least about 110, at least about 120, at least about 130, at least about 140, at least about 150, at least about 160, at least about 170, at least about 180, at least about 190, or at least about 200 amino acids. In some aspects, the L1 and/or L2 optional linker is a glycine/serine (Gly-Ser) linker as described below.

[0500] In some aspects, a modular CAR spacer of the present disclosure is about 15 amino acids, about 30 amino acids, about 45 amino acids, about 60 amino acids, about 75 amino acids, about 90 amino acids, about 105 amino acids, about 120 amino acids, about 135 amino acids, about 150 amino acids, about 165 amino acids, about 180 amino acids, about 195 amino acids, about 210 amino acids, about 225 amino acids, about 240 amino acids, about 255 amino acids, about 270 amino acids, about 285 amino acids, about 300 amino acids in length.

[0501] In some aspects, a modular CAR spacer of the present disclosure is between about 10 and about 15, between about 15 and about 20, between about 20 and 25, between about 25 and about 30, between about 30 and about 35, between about 35 and about 40, between about 40 and about 45, between about 45 and about 50, between about 50 and about 55, between about 55 and about 60, between about 60 and about 65, between about 65 and about 70, between about 70 and about 75, between about 75 and about 80, between about 80 and about 85, between about 85 and about 90, between about 95 and about 100, between about 100 and about 105, between about 105 and about 110, between about 110 and about 115, between about 115 and about 120, between about 120 and about 125, between about 125 and about 130, between about 130 and about 135, between about 135 and about 140, between about 140 and about 145, between about 145 and about 150, between about 150 and about 155, between about 155 and about 160, between about 160 and about 165, between about 165 and about 170, between about 170 and about 175, between about 175 and 180, between about 180 and about 185, between about 185 and about 190, between about 190 and about 196, between about 195 and about 200, between about 200 and about 205, between about 205 and about 210, between about 210 and about 215, between about 215 and about 220, between about 220 and about 225, between about 225 and about 230, between about 230 and about 235, between about 235 and about 240, between about 240 and about 245, between about 245 and about 250, between about 250 and about 255, between about 255 and about 260, between about 260 and about 265, between about 265 and about 270, between about 270 and about 275, between about 275 and about 280, between about 280 and about 285, between about 285 and about 290, between about 290 and about 295, or between about 295 and about 300 amino acids in length.

### Linkers

[0502] In some aspects, any CAR spacer of the present disclosure (e.g., any CAR spacer disclosed in TABLES 1, 3, 5, 7, 9A, 9B, 11, 13, 15, or 17, optionally comprising N- and C-terminal sequences disclosed in TABLES 2, 4, 6, 8, 10A, 10B, 12, 14, 16, or 18, or any modular CAR spacer disclosed herein) can comprise an optional N-terminal linker and/or an optional C-terminal linker. Flexible linker sequences known the art can be used as optional linkers. In some aspects, the linker is a glycine/serine linker. As used herein, term “glycine/serine” is used interchangeably with the term “Gly/Ser” and refers to a linker sequence comprising repeats of the amino acids glycine (G, Gly) and/or serine (S, Ser) as exemplified below.

[0503] In some aspects, the optional linker is a glycine/serine linker according to the formula [(Gly)n-Ser]m (SEQ ID NO: 4813) where n is any integer from 1 to 100 and m is any integer from 1 to 100. In other aspects, the glycine/serine linker is according to the formula [(Gly)x-Sery]z (SEQ ID NO: 4814) wherein x in an integer from 1 to 4, y is 0 or 1, and z is an integers from 1 to 50. In some aspects, the optional linker comprises the sequence Gn (SEQ ID NO: 4815), where n can be an integer from 1 to 100. In some aspects, the optional linker can comprise the sequence (GlyAla)n (SEQ ID NO: 4816), wherein n is an integer between 1 and 100.

[0504] In some aspects, the sequence of the optional linker has the sequence set forth in SEQ ID NO: 4817. In some aspects, the sequence of the optional linker is GGGSG (SEQ ID NO: 4818). In some aspects, the sequence of the optional linker is GGGGSG (SEQ ID NO: 5088).

[0505] In other aspects, the optional linker comprises the sequence set forth in SEQ ID NO: 4819. In other aspects, the optional linker comprises the sequence set forth in SEQ ID NO:4820. In other aspects, the optional linker can comprise the sequence set forth in SEQ ID NO: 4821. In other aspects, the optional linker can comprise the sequence set forth in SEQ ID NO: 4822. In these instances, n can be an integer from 1 to 100. In other instances, n can be an integer from one to 20, i.e., 1, 2, 3, 4, 5, 6, 7, 8, 9, 10, 11, 12, 13, 14, 15, 16, 17, 18, 19, or 20. In some aspects n is an integer from 1 to 100.

[0506] Examples of the optional linker include, but are not limited to, e.g., the sequences set forth in SEQ ID NOS: 4823, 4824, 4825, 4826, 4827, 4828, or 4829.

[0507] In some aspects, the optional linker comprises the sequence PGG. In some aspects, the optional linker comprises additional amino acids in addition to Glycine and Serine. In some aspects, the optional linker comprises 1, 2, 3, 4, or 5 non-gly/non-ser amino acids. In some aspects, the Gly/Ser-linker comprises at least about 60%, at least about 65%, at least about 70%, at least about 80%, at least about 85%, at least about 90%, or at least 95% glycine or serine amino acids.

[0508] In some specific aspects, the optional linker is between 1 and 10 amino acids in length. In some aspects, the optional linker as between about 5 and about 10, between about 10 and about 20, between about 20 and about 30, between about 30 and about 40, between about 40 and about 50, between about 50 and about 60, between about 60 and about 70, between about 70 and about 80, between about 80 and about 90, or between about 90 and about 100 amino acids in length.

### Rational Design of Ig Derived CAR Spacers

[0509] In some aspects, the present disclosure provides Ig derived CAR spacers selected to position the antigen-binding portion of the CAR at an optimal distanced or in an optimal position to interact with the an epitope located on the target protein. As represented schematically in FIG. 7, it is possible to estimate the optimal length of a CAR spacer, e.g., by having an estimate or measurement of the distance between the epitope at the surface of the target cell, and an estimate or measurement of the signaling synapse, i.e., the distance between the surface of the cell expressing the CAR (e.g., a CART cell) and the surface of the target cell.

[0510] In some aspects, the calculation can assume that the width of the signaling synapse is approximately 150 angstroms. In some aspects, the distance between the epitope and the surface of the target cell membrane can be estimated, e.g., using x-ray crystallography, NMR, or cryo-EM structure. In other aspects, the distance between the epitope and the surface of the target cell membrane can be estimated, e.g., using spectroscopic techniques, for example, using Fluorescence Resonance Energy Transfer (FRET).

[0511] In some aspect, the estimates can be used to select a subset of candidate CAR spacer sequences for screening. These sequences can be subsequently screened as described in the Examples section of the present application in order to determine, e.g, which spacer (and, therefore, spacer lengths) result in increased cytokine secretion or target cell lysis.

[0512] In some aspects, the present disclosure provides a polynucleotide encoding a CAR comprising (i) an antigen-binding domain that binds to an epitope on a tumor antigen expressed on a target cell; (ii) a transmembrane domain; (iii) an intracellular domain; and, (iv) a CAR spacer of the present disclosure located between the antigen-binding domain and the transmembrane domain comprising an amino acid sequence derived from a human immunoglobulin hinge region or a functional fragment thereof, wherein
[0513] (a) the CAR spacer of the present disclosure is between about 150 amino acids and about 125 amino acids in length; and, the distance between the epitope and the surface of the target cell membrane is less than about 10 Å;
[0514] (b) the CAR spacer of the present disclosure is between about 125 amino acids and about 100 amino acids in length; and, the distance between the epitope and the surface of the target cell membrane is less than about 10 Å;
[0515] (c) the CAR spacer of the present disclosure is between about 100 amino acids and about 75 amino acids in length; and, the distance between the epitope and the surface of the target cell membrane is less than about 10 Å;
[0516] (d) the CAR spacer of the present disclosure is between about 75 amino acids and about 36 amino acids in length; and, the distance between the epitope and the surface of the target cell membrane is less than about 15 Å;
[0517] (e) the CAR spacer of the present disclosure is between about 35 amino acids and about 21 amino acids in length; and, the distance between the epitope and the surface of the target cell membrane is between about 15 Å and about 25 Å;

[0518] (f) the CAR spacer of the present disclosure is between about 20 amino acids and about 16 amino acids in length; and, the distance between the epitope and the surface of the target cell membrane is between about 25 Å and about 35 Å;
[0519] (g) the CAR spacer of the present disclosure is between about 15 amino acids and about 11 amino acids in length; and, the distance between the epitope and the surface of the target cell membrane is between about 35 Å and about 45 Å; or,
[0520] (h) the CAR spacer of the present disclosure is between about 10 amino acids and about 5 amino acids in length; and, the distance between the epitope and the surface of the target cell membrane is more than about 45 Å.

[0521] In some aspects, the present disclosure provides a polynucleotide encoding a CAR comprising (i) an antigen-binding domain that binds to an epitope on a tumor antigen expressed on a target cell; (ii) a transmembrane domain; (iii) an intracellular domain; and, (iv) a CAR spacer of the present disclosure located between the antigen-binding domain and the transmembrane domain comprising an amino acid sequence derived from a human immunoglobulin hinge region or a functional fragment thereof, wherein
[0522] (a) the CAR spacer of the present disclosure is between about 600 Å and about 500 Å in length; and, the distance between the epitope and the surface of the target cell membrane is less than about 10 Å;
[0523] (b) the CAR spacer of the present disclosure is between about 500 Å and about 400 Å in length; and, the distance between the epitope and the surface of the target cell membrane is less than about 10 Å;
[0524] (c) the CAR spacer of the present disclosure is between about 400 Å and about 300 Å in length; and, the distance between the epitope and the surface of the target cell membrane is less than about 10 Å;
[0525] (d) the CAR spacer of the present disclosure is between about 300 Å and about 150 Å in length; and, the distance between the epitope and the surface of the target cell membrane is less than about 15 Å;
[0526] (e) the CAR spacer of the present disclosure is between about 150 Å and about 80 Å in length; and, the distance between the epitope and the surface of the target cell membrane is between about 15 Å and about 25 Å;
[0527] (f) the CAR spacer of the present disclosure is between about 80 Å and about 60 Å in length; and, the distance between the epitope and the surface of the target cell membrane is between about 25 Å and about 35 Å;
[0528] (g) the CAR spacer of the present disclosure is between about 60 Å and about 40 Å in length; and, the distance between the epitope and the surface of the target cell membrane is between about 35 Å and about 45 Å; or,
[0529] (h) the CAR spacer of the present disclosure is between about 40 Å and about 20 Å in length; and, the distance between the epitope and the surface of the target cell membrane is more than about 45 Å.

[0530] In some aspects, the distance between the epitope and the surface of the target cell membrane is less than about 10 Å and the spacer is 125, 126, 127, 128, 129, 130, 131, 132, 133, 134, 135, 136, 137, 138, 139, 140, 141, 142, 143, 144, 145, 146, 147, 148, 149 or 150 amino acids in length. In some aspects, the distance between the epitope and the surface of the target cell membrane is less than about 10 Å and the spacer is about 500, about 510, about 520, about 530, about 540, about 550, about 560, about 570, about 580, about 590, or about 600 Å in length.

[0531] In some aspects, the distance between the epitope and the surface of the target cell membrane is less than about 10 Å and the spacer is 100, 101, 102, 103, 104, 105, 106, 107, 108, 109, 110, 111, 112, 113, 114, 115, 116, 117, 118, 119, 120, 121, 122, 123, 124 or 125 amino acids in length. In some aspects, the distance between the epitope and the surface of the target cell membrane is less than about 10 Å and the spacer is about 400, about 410, about 420, about 430, about 440, about 450, about 460, about 470, about 480, about 490, or about 500 Å in length.

[0532] In some aspects, the distance between the epitope and the surface of the target cell membrane is less than about 10 Å and the spacer is 75, 76, 77, 78, 79, 80, 81, 82, 83, 84, 85, 86, 87, 88, 89, 90, 91, 92, 93, 94, 95, 96, 97, 98, 99 or 100 amino acids in length. In some aspects, the distance between the epitope and the surface of the target cell membrane is less than about 10 Å and the spacer is about 300, about 310, about 320, about 330, about 340, about 350, about 360, about 370, about 380, about 390, or about 400 Å in length.

[0533] In some aspects, the distance between the epitope and the surface of the target cell membrane is less than about 15 Å and the spacer is 36, 37, 38, 39, 40, 41, 42, 43, 44, 45, 46, 47, 48, 49, 50, 51, 52, 53, 54, 55, 56, 57, 58, 59, 60, 61, 62, 63, 64, 65, 66, 67, 68, 69, 70, 71, 72, 73, 74 or 75 amino acids in length. In some aspects, the distance between the epitope and the surface of the target cell membrane is less than about 15 Å and the spacer is about 150, about 160, about 170, about 180, about 190, about 200, about 210, about 220, about 230, about 240, about 250, about 260, about 270, about 280, about 290 or about 300 Å in length.

[0534] In some aspect, the distance between the epitope and the surface of the target cell membrane is between about 15 Å and about 25 Å and the spacer is 21, 22, 23, 24, 25, 26, 27, 28, 29, 30, 31, 32, 33, 34 or 35 amino acids in length. In some aspect, the distance between the epitope and the surface of the target cell membrane is between about 15 Å and about 25 Å and the spacer is about 80, about 90, about 100, about 110, about 120, about 130, about 140 or about 150 Å in length.

[0535] In some aspects, the distance between the epitope and the surface of the target cell membrane is between about 25 Å and about 35 Å and the spacer is 16, 17, 18, 19 or 20 amino acids in length. In some aspects, the distance between the epitope and the surface of the target cell membrane is between about 25 Å and about 35 Å and the spacer is about 60, about 65, about 70, about 75 or about 80 Å in length.

[0536] In some aspects, the distance between the epitope and the surface of the target cell membrane is between about 35 Å and about 45 Å and the spacer is 11, 12, 13, 14, or 15 amino acids in length. In some aspects, the distance between the epitope and the surface of the target cell membrane is between about 35 Å and about 45 Å and the spacer is about 40, about 45, about 50, about 55 or about 60 Å in length.

[0537] In some aspects, the distance between the epitope and the surface of the target cell membrane is more than about 45 Å and the spacer is 5, 6, 7, 8, 9 or 10 amino acids in length. In some aspects, the distance between the epitope and the surface of the target cell membrane is more than about 45 Å and the spacer is about 20, about 25, about 30, about 35, or about 40 Å in length.

[0538] Also provided is a polynucleotide encoding a CAR comprising (i) an antigen-binding domain that binds to an epitope on a tumor antigen expressed on a target cell; (ii) a transmembrane domain; (iii) an intracellular domain; and, (iv) a CAR spacer of the present disclosure located between the antigen-binding domain and the transmembrane domain comprising an amino acid sequence derived from a human immunoglobulin hinge region or a functional fragment thereof, wherein
[0539] (a) the CAR spacer of the present disclosure is between about 450 Å and about 375 Å in length; and, the distance between the epitope and the surface of the target cell membrane is less than about 10 Å;
[0540] (b) the CAR spacer of the present disclosure is between about 375 Å and about 300 Å in length; and, the distance between the epitope and the surface of the target cell membrane is less than about 10 Å;
[0541] (c) the CAR spacer of the present disclosure is between about 300 Å and about 225 Å in length; and, the distance between the epitope and the surface of the target cell membrane is less than about 10 Å;
[0542] (d) the CAR spacer of the present disclosure is between about 225 Å and about 100 Å in length; and, the distance between the epitope and the surface of the target cell membrane is less than about 15 Å;
[0543] (e) the CAR spacer of the present disclosure is between about 100 Å and about 60 Å in length; and, the distance between the epitope and the surface of the target cell membrane is between about 15 Å and about 25 Å;
[0544] (f) the CAR spacer of the present disclosure is between about 60 Å and about 45 Å in length; and, the distance between the epitope and the surface of the target cell membrane is between about 25 A and about 35 Å;
[0545] (g) the CAR spacer of the present disclosure is between about 45 Å and about 30 Å in length; and, the distance between the epitope and the surface of the target cell membrane is between about 35 Å and about 45 Å; or,
[0546] (h) the CAR spacer of the present disclosure is between about 30 Å and about 15 Å in length; and, the distance between the epitope and the surface of the target cell membrane is more than about 45 Å.

[0547] In some aspects, the distance between the epitope and the surface of the target cell membrane is less than about 10 Å and the spacer is about 450 Å, about 440 Å, about 430 Å, about 420 Å, about 410 Å, about 400 Å, about 390 Å, about 380 Å or about 375 Å in length. In some aspects, the distance between the epitope and the surface of the target cell membrane is less than about 10 Å and the spacer is about 375 Å, about 370 Å, about 360 Å, about 350 Å, about 340 Å, about 330 Å, about 320 Å, about 310 Å, or about 300 Å in length. In some aspects, the distance between the epitope and the surface of the target cell membrane is less than about 10 Å and the spacer is about 300 Å, about 290 Å, about 280 Å, about 270 Å, about 260 Å, about 250 Å, about 240 Å, about 230 Å, or about 225 Å in length. In some aspects, the distance between the epitope and the surface of the target cell membrane is less than about 15 Å the spacer is about 225 Å, about 220 Å, about 210 Å, about 200 Å, about 190 Å, about 180 Å, about 170 Å, about 160 Å, about 150 Å, about 140 Å, about 130 Å, about 120 Å, about 110 Å, or about 100 Å in length. In some aspects, the distance between the epitope and the surface of the target cell membrane is between about 15 Å and about 25 Å and the spacer is about 100 Å, about 95 Å, about 90 Å, about 85 Å, about 80 Å, about 75 Å, about 70 Å, about 65 Å, or about 60 Å in length. In some aspects, the distance between the epitope and the surface of the target cell membrane is between about 25 Å and about 35 Å and the spacer is about 60 Å, about 55 Å, about 50 Å, and about 45 Å in length. In some aspects, the distance between the epitope and the surface of the target cell membrane is between about 35 Å and about 45 Å and the spacer is about 45 Å, about 40 Å, about 35 Å, or about 30 Å in length. In some aspects, the distance between the epitope and the surface of the target cell membrane is more than about 45 Å and the spacer is about 30 Å, about 25 Å, about 20 Å, or about 15 Å in length.

### Antigen-Binding Domains

[0548] In some aspects, the polypeptide encoding a CAR of the present disclosure, i.e., a CAR comprising a CAR spacer of the present disclosure (i.e., a hinge region derived CAR spacer, a loop region derived CAR spacer, or a combination thereof), comprises an antigen-binding domain comprising an antibody or an antigen-binding fragment thereof (e.g., an ScFv) that specifically binds to an epitope on a tumor antigen, e.g., a protein kinase such as a tyrosine protein kinase.

[0549] In some aspects, the tumor antigen is selected from the group consisting of ROR1, HER2, AFP, CD19, TRAC, TCRβ, BCMA, CLL-1, CS1, CD38, CD19, TSHR, CD123, CD22, CD30, CD70, CD171, CD33, EGFRvIII, GD2, GD3, Tn Ag, PSMA, ROR2, GPC1, GPC2, FLT3, FAP, TAG72, CD44v6, CEA, EPCAM, B7H3, KIT, IL-13Ra2, mesothelin, IL-11Ra, PSCA, PRSS21, VEGFR2, LewisY, CD24, PDGFR-beta, SSEA-4, CD20, folate receptor alpha, ERBB2 (Her2/neu), MUC1, MUC16, EGFR, NCAM, prostase, PAP, ELF2M, Ephrin B2, IGF-I receptor, CAIX, LMP2, gplOO, bcr-abl, tyrosinase, EphA2, Fucosyl GM1, sLe, GM3, TGSS, HMWMAA, o-acetyl-GD2, Folate receptor beta, TEM1/CD248, TEM7R, CLDN6, GPRCSD, CXORF61, CD97, CD179a, ALK, Polysialic acid, PLAC1, GloboH, NY-BR-1, UPK2, HAVCR1, ADRB3, PANX3, GPR20, LY6K, OR51E2, TARP, WT1, NY-ESO-1, LAGE-la, MAGE-Al, legumain, HPV E6,E7, MAGE Al, ETV6-AML, sperm protein 17, XAGE1, Tie 2, MAD-CT-1, MAD-CT-2, Fos-related antigen 1, p53, p53 mutant, prostein, survivin and telomerase, PCTA-1/Galectin 8, MelanA/MART1, Ras mutant, hTERT, sarcoma translocation breakpoints, ML-IAP, ERG (TMPRSS2 ETS fusion gene), NA17, PAX3, Androgen receptor, Cyclin Bl, MYCN, RhoC, TRP-2, CYP1B1, BORIS, SART3, PAXS, OY-TES1, LCK, AKAP-4, SSX₂, RAGE-1, human telomerase reverse transcriptase, RU1, RU2, intestinal carboxyl esterase, mut hsp70-2, CD79a, CD79b, CD72, LAIR1, FCAR, LILRA2, CD300LF, CLEC12A, BST2, EMR2, LY75, GPC3, FCRL5, IGLL1, CD2, CD3c, CD4, CDS, CD7, the extracellular portion of the APRIL protein, and any combinations thereof.

[0550] In some aspects, the antigen-binding domain of a CAR of the present disclosure is an lg NAR, a Fab, a Fab′, a F(ab)′2, a F(ab)′3, an Fv, a single chain variable fragment (scFv), a bis-scFv, a (scFv)₂, a minibody, a diabody, a triabody, a tetrabody, an intrabody, a disulfide stabilized Fv protein (dsFv), a unibody, or a nanobody. In some instances, scFvs can be prepared according to method known in the art (see, for example, Bird et al., (1988) Science 242:423-426 and Huston et al., (1988) Proc. Natl. Acad. Sci. USA 85:5879-5883). ScFv molecules can be produced by linking VH and VL regions together using flexible polypeptide linkers. The scFv molecules comprise a linker (e.g., a Ser-Gly linker) with an optimized length and/or amino acid composition. The linker length can greatly affect how the variable regions of a scFv fold and interact. In fact, if a short polypeptide linker is employed (e.g., between 5-10 amino acids) intrachain folding is prevented. Interchain folding is also required to bring the two variable regions together to form a functional epitope binding site. For examples of linker orientation and size see, e.g., Hollinger et al. 1993 Proc Natl Acad. Sci. U.S.A. 90:6444-6448, U.S. Patent Application Publication Nos. 2005/0100543, 2005/0175606, 2007/0014794, and PCT publication Nos. WO2006/020258 and WO2007/024715, is incorporated herein by reference.

[0551] An scFv can comprise a linker of, e.g., at least 1, 2, 3, 4, 5, 6, 7, 8, 9, 10, 11, 12, 13, 14, 15, 16, 17, 18, 19, 20, 25, 30, 35, 40, 45, 50, or more amino acid residues between its VL and VH regions. The linker sequence may comprise any naturally occurring amino acid. In some embodiments, the linker sequence comprises amino acids glycine and serine. In another aspect, the linker sequence comprises sets of glycine and serine repeats such as (Gly₄Ser)n, where n is a positive integer equal to or greater than 1 (SEQ ID NO:81). In some aspects, the linker can be (Gly₄Ser)₄ (SEQ ID NO:82) or (Gly₄Ser)₃(SEQ ID NO:83), or any gly-ser rich linker disclosed above.

[0552] In some aspects, the linker can be GSTSGSGKPGSGEGSTKG (SEQ ID NO:4885), e.g., in an anti-CD19 scFv such as a FMC63-based scFv. In other aspects, the linker can be GSTSGSGKPGSGEGS (SEQ ID NO:4886), e.g., in an anti-Her2 based.

[0553] Variation in the linker length may retain or enhance activity, giving rise to superior efficacy in activity studies.

[0554] In some aspects, the amino acid sequence of the antigen-binding domain or other portions or the entire CAR can be modified, e.g., an amino acid sequence described herein can be modified, e.g., by a conservative substitution. Families of amino acid residues having similar side chains have been defined in the art, including basic side chains (e.g., lysine, arginine, histidine), acidic side chains (e.g., aspartic acid, glutamic acid), uncharged polar side chains (e.g., glycine, asparagine, glutamine, serine, threonine, tyrosine, cysteine), nonpolar side chains (e.g., alanine, valine, leucine, isoleucine, proline, phenylalanine, methionine, tryptophan), beta-branched side chains (e.g., threonine, valine, isoleucine) and aromatic side chains (e.g., tyrosine, phenylalanine, tryptophan, histidine).

[0555] In some specific aspects, the tumor antigen is the tyrosine-protein kinase transmembrane receptor “ROR1,” also known as neurotrophic tyrosinase kinase, receptor-related 1 (NTRKR1). The human amino acid and nucleic acid sequences can be found in a public database, such as GenBank, UniProt and Swiss-Prot. For example, the amino acid sequences of isoforms 1 and 2 precursors of human ROR1 can be found at Accession Nos. NP_005003.2 and NP_001077061.1, respectively, and the mRNA sequences encoding them can be found at Accession Nos. NM_005012.3 and NM_001083592.1, respectively. As used herein, “ROR1” includes proteins comprising mutations, e.g., point mutations, fragments, insertions, deletions and splice variants of full length wild-type ROR1. In some aspects the antigen-binding portion of the CAR recognizes and binds an antigen within the extracellular domain of the ROR1 protein. In some aspects, the ROR1 protein is expressed on a cancer cell.

[0556] ROR1 is a member of the receptor tyrosine kinase-like orphan receptor (ROR) family. In humans ROR1 is encoded by the ROR1 gene. The protein encoded by this gene is a receptor tyrosine kinase that modulates growth in the central nervous system and has a role in the metastasis of cancer cells. ROR1 is considered a pseudokinase that lacks significant catalytic activity and interacts with the non-canonical Wnt signaling pathway. Increase expression of ROR1 is associate, e.g., with B-cell chronic lymphocytic leukemia. ROR1 is highly expressed in circulating tumor cells and promotes invasion of pancreatic cancer cells (Xu et al., 2018, Mol. Med. Rep. 18:5087-5094). ROR1 also appears to promote tumor progression in endometrial cancer, similar to its role in ovarian cancer (Henry et al, 2018, Gynecol. Oncol. 148:576-584). ROR1 is expressed in epithelial tumors and is homogenously expressed on a subset of ovarian cancer, triple-negative breast cancer, and lung cancer (Balakrishnan et al., 2017, Clin, Cancer Res. 23:3061-3071). ROR1 expression has also been positively associated with lymph-node metastasis in colorectal cancer patients (Zhou et al., 2017, Oncotarget 8:32864-32872).

[0557] In some aspects, anti-ROR1 inhibitors, e.g., CARs of present disclosure or cells expressing those CARs, can be used to treat B-cell malignancies (e.g., leukemias, such as CLL, and B-cell lymphomas, such as mantle cell lymphoma; ALL; small lymphocytic lymphoma; marginal cell B-Cell lymphoma; and Burkett's Lymphoma) or epithelial cancers (e.g., breast cancer, renal cell carcinoma, lung cancer, colorectal cancers, ovarian cancer, and melanoma).

[0558] An exemplary anti-ROR1 CAR is described in Hudecek, et al. Clin. Cancer Res. 19.12(2013):3153-64, incorporated herein by reference. In some aspects, a CAR of the present disclosure comprises the anti-ROR1 CART described in Hudecek et al. (for example, generated as described in Hudecek et al. at page 3155, first full paragraph, incorporated herein by reference), wherein the spacer disclosed in Hudecek has been replaced by a CAR spacer of the present disclosure. In other aspects, an anti-ROR1 CAR of the present disclosure includes an antibody or fragment thereof comprising the VH and/or VL sequences of the 2A2, R11, and R12 anti-ROR1 monoclonal antibodies described in Hudecek et al. at paragraph bridging pages 3154-55; Baskar et al. MAbs 4(2012):349-61; and Yang et al. PLoS ONE 6(2011):e21018, incorporated herein by reference.

[0559] In some aspects, an antigen-binding domain of the present disclosure is capable of cross-competing with an anti-ROR1 antibody, e.g., R11, R12, or 2A2 antibodies. The R11, R12, and 2A2 antibody sequences are shown in TABLE 19. In some aspects, the antigen-binding domain useful for the present disclosure binds to the same epitope of the R11 antibody, the R12 antibody, or the 2A2 antibody.

TABLE 19
R11, R12 and 2A2 antibody CDRs

| | | |
|---|---|---|
| R11 VH | R12 VH | 2A2 VH |
| (SEQ ID NO: 4887) | (SEQ ID NO: 4895) | (SEQ ID NO: 4903) |
| R11 VH CDR1 | R12 VH CDR1 | 2A2 VH CDR1 |
| (SEQ ID NO: 4888) | (SEQ ID NO: 4896) | (SEQ ID NO: 4904) |
| R11 VH CDR2 | R12 VH CDR2 | 2A2 VH CDR2 |
| (SEQ ID NO: 4889) | (SEQ ID NO: 4897) | (SEQ ID NO: 4905) |
| R11 VH CDR3 | R12 VH CDR3 | 2A2 VH CDR3 |
| (SEQ ID NO: 4890) | (SEQ ID NO: 4898) | (SEQ ID NO: 4906) |
| R11 VL | R12 VL | 2A2 VL |
| (SEQ ID NO: 4891) | (SEQ ID NO: 4899) | (SEQ ID NO: 4907) |
| R11 VL CDR1 | R12 VL CDR1 | 2A2 VL CDR1 |
| (SEQ ID NO: 4892) | (SEQ ID NO: 4900) | (SEQ ID NO: 4908) |
| R11 VL CDR2 | R12 VL CDR2 | 2A2 VL CDR2 |
| (SEQ ID NO: 4893) | (SEQ ID NO: 4901) | (SEQ ID NO: 4909) |
| R11 VL CDR3 | R12 VL CDR3 | 2A2 VL CDR3 |
| (SEQ ID NO: 4894) | (SEQ ID NO: 4902) | (SEQ ID NO: 4910) |

[0560] In some aspects, the antigen-binding domain of the present disclosure comprises VH CDR3 of the R11 antibody. In some aspects, the antigen-binding domain of the present disclosure comprises VH CDR1, VH CDR2 and VH CDR3 of the R11 antibody. In some aspects, the antigen-binding domain of the present disclosure comprises VH CDR1, VH CDR2, VH CDR3, VL CDR1, VL CDR2, and VL CDR3 of the R11 antibody. In some aspects, the antigen-binding domain of the present disclosure, e.g., R11 scFv, comprises the VH and the VL of the R11 antibody. In some aspects, the R11 scFv is linked to a transmembrane domain by an IgG2 linker, e.g., Spacer 1 (SEQ ID NO: 4830), and optionally a linker of SEQ ID NO: 4818 or 5088. In some aspects, the R11 scFv is linked to a transmembrane domain by an IgG1 linker, e.g., Spacer 11 (SEQ ID NO: 4840), and optionally a linker of SEQ ID NO: 4818 or 5088. In some aspects, the R11 scFv is linked to a transmembrane domain by an IgG3 linker, e.g., Spacer 13 (SEQ ID NO: 4841), and optionally a linker of SEQ ID NO: 4818. In some aspects, the R11 scFv is linked to a transmembrane domain by an IgG2 linker, e.g., Spacer 14 (SEQ ID NO: 4842), and optionally a linker of SEQ ID NO: 4818 or 5088.

[0561] In some aspects, the R11 scFv is linked to a transmembrane domain by an IgG3 linker, e.g., Spacer 4 (SEQ ID NO: 4833), and optionally a linker of SEQ ID NO: 4818 or 5088. In some aspects, the R11 scFv is linked to a transmembrane domain by an IgG3 linker, e.g., Spacer 5 (SEQ ID NO: 4834), and optionally a linker of SEQ ID NO: 4818 or 5088. In some aspects, the R11 scFv is linked to a transmembrane domain by an IgG3 linker, e.g., Spacer 6 (SEQ ID NO: 4835), and optionally a linker of SEQ ID NO: 4818 or 5088.

[0562] In some aspects, the antigen-binding domain of the present disclosure comprises VH CDR3 of the R12 antibody. In some aspects, the antigen-binding domain of the present disclosure comprises VH CDR1, VH CDR2 and VH CDR3 of the R12 antibody. In some aspects, the antigen-binding domain of the present disclosure comprises VH CDR1, VH CDR2, VH CDR3, VL CDR1, VL CDR2, and VL CDR3 of the R12 antibody. In some aspects, the antigen-binding domain of the present disclosure, e.g., R12 scFv, comprises the VH and the VL of the R12 antibody. In some aspects, the R12 scFv is linked to a transmembrane domain by an IgG2 linker, e.g., Spacer 1 (SEQ ID NO: 4830), and optionally a linker of SEQ ID NO: 4818 or 5088. In some aspects, the R12 scFv is linked to a transmembrane domain by an IgG1 linker, e.g., Spacer 11 (SEQ ID NO: 4840), and optionally a linker of SEQ ID NO: 4818 or 5088. In some aspects, the R12 scFv is linked to a transmembrane domain by an IgG3 linker, e.g., Spacer 13 (SEQ ID NO: 4841), and optionally a linker of SEQ ID NO: 4818 or 5088. In some aspects, the R12 scFv is linked to a transmembrane domain by an IgG2 linker, e.g., Spacer 14 (SEQ ID NO: 4842), and optionally a linker of SEQ ID NO: 4818 or 5088.

[0563] In some aspects, the antigen-binding domain of the present disclosure comprises VH CDR3 of the 2A2 antibody. In some aspects, the antigen-binding domain of the present disclosure comprises VH CDR1, VH CDR2 and VH CDR3 of the 2A2 antibody. In some aspects, the antigen-binding domain of the present disclosure comprises VH CDR1, VH CDR2, VH CDR3, VL CDR1, VL CDR2, and VL CDR3 of the 2A2 antibody. In some aspects, the antigen-binding domain of the present disclosure, e.g., 2A2 scFv, comprises the VH and the VL of the 2A2 antibody. In some aspects, the 2A2 scFv is linked to a transmembrane domain by an IgG2 linker, e.g., Spacer 1 (SEQ ID NO: 4830), and optionally a linker of SEQ ID NO: 4818 or 5088. In some aspects, the 2A2 scFv is linked to a transmembrane domain by an IgG1 linker, e.g., Spacer 11 (SEQ ID NO: 4840), and optionally a linker of SEQ ID NO: 4818 or 5088. In some aspects, the 2A2 scFv is linked to a transmembrane domain by an IgG3 linker, e.g., Spacer 13 (SEQ ID NO: 4841), and optionally a linker of SEQ ID NO: 4818. In some aspects, the 2A2 scFv is linked to a transmembrane domain by an IgG2 linker, e.g., Spacer 14 (SEQ ID NO: 4842), and optionally a linker of SEQ ID NO: 4818 or 5088.

[0564] In some aspects, the 2A2 scFv is linked to a transmembrane domain by an IgG3 linker, e.g., Spacer 9 (SEQ ID NO: 4838), and optionally a linker of SEQ ID NO: 4818 or 5088. In some aspects, the 2A2 scFv is linked to a transmembrane domain by an IgG3 linker, e.g., Spacer 10 (SEQ ID NO: 4839), and optionally a linker of SEQ ID NO: 4818 or 5088.

[0565] In other aspects, a CAR of the present disclosure targeting ROR1 includes an antibody or fragment thereof (e.g., single chain variable fragment (scFv)) that targets ROR1, including those described in U.S. Pat. No. 9,316,646B2, issued Sep. 12, 2017, or U.S. Pat. No. 9,758,586B2, issued Apr. 19, 2016, incorporated herein by reference.

[0566] In some aspects, a CAR of the present disclosure comprises an antigen-binding domain, a transmembrane domain, and an intracellular domain, wherein the antigen-binding domain and the transmembrane domain are linked by a CAR spacer of the present disclosure, wherein the spacer comprises the sequence set forth in SEQ ID NO: 4830, and optionally a linker of SEQ ID NO: 4818 or 5088, and wherein the antigen-binding domain comprises VH CDR1, VH CDR2, VH CDR3, VL CDR1, VL CDR2, and VL CDR3 of the R11 antibody, e.g., VH and VL of the R11 antibody. In some aspects, the spacer comprises the sequence set forth in SEQ ID NO: 4840, SEQ ID NO: 4841, or SEQ ID NO: 4842, and optionally a linker of SEQ ID NO: 4818 or 5088. In some aspects, the combined length of the optional linker of SEQ ID NO:4818 or 5088 and the spacer is between about 180 Å and about 250 Å. In some aspects, the combined length of the optional linker of SEQ ID NO:4818 or 5088 and the spacer is about 200 Å. In some aspects, the combined length of the optional linker of SEQ ID NO:4818 or 5088 and the spacer is about 180 Å, about 190 Å, about 200 Å, about 210 Å, about 210 Å, about 230 Å, about 240 Å, or about 250 Å.

[0567] In some aspects, a CAR of the present disclosure comprises an antigen-binding domain, a transmembrane domain, and an intracellular domain, wherein the antigen-binding domain and the transmembrane domain are linked by a CAR spacer of the present disclosure, wherein the spacer comprises the sequence set forth in SEQ ID NO: 4830, and optionally a linker of SEQ ID NO: 4818 or 5088, and wherein the antigen-binding domain comprises VH CDR1, VH CDR2, VH CDR3, VL CDR1, VL CDR2, and VL CDR3 of the R12 antibody, e.g., VH and VL of the R12 antibody. In some aspects, the spacer comprises a sequence set forth in SEQ ID NO: 4840, SEQ ID NO: 4841, or SEQ ID NO: 4842, and optionally a linker of SEQ ID NO: 4818 or 5088. In some aspects, the combined length of the optional linker of SEQ ID NO:4818 or 5088 and the spacer is between about 35 Å and about 55 Å. In some aspects, the combined length of the optional linker of SEQ ID NO:4818 or 5088 and the spacer is about 45 Å. In some aspects, the combined length of the optional linker of SEQ ID NO:4818 or 5088 and the spacer is about 35 Å, about 40 Å, about 45 Å, about 50 Å, or about 55 Å.

[0568] In some aspects, a CAR of the present disclosure comprises an antigen-binding domain, a transmembrane domain, and an intracellular domain, wherein the antigen-binding domain and the transmembrane domain are linked by a CAR spacer of the present disclosure, wherein the spacer comprises the sequence set forth in SEQ ID NO: 4830, and optionally a linker of SEQ ID NO: 4818 or 5088, and wherein the antigen-binding domain comprises VH CDR1, VH CDR2, VH CDR3, VL CDR1, VL CDR2, and VL CDR3 of the 2A2 antibody, e.g., VH and VL of the 2A2 antibody. In some aspects, the spacer comprises the sequence set forth in SEQ ID NO: 4840, SEQ ID NO: 4841, or SEQ ID NO: 4842, and optionally a linker of SEQ ID NO: 4818 or 5088. In some aspects, the combined length of the optional linker of SEQ ID NO:4818 or 5088 and the spacer is between about 35 Å and about 55 Å. In some aspects, the combined length of the optional linker of SEQ ID NO:4818 or 5088 and the spacer is about 45 Å. In some aspects, the combined length of the optional linker of SEQ ID NO:4818 or 5088 and the spacer is about 35 Å, about 40 Å, about 45 Å, about 50 Å, or about 55 Å.

[0569] In some aspects, anti-ROR1 antigen-binding antibody fragments (e.g., scFvs) are conjugated or fused to a biologically active molecule, e.g., to form a CAR of the present disclosure (i.e., a CAR comprising a CAR spacer of the present disclosure, i.e., a hinge derived CAR spacer, a loop derived CAR spacer, or a combination thereof) that directs immune cells, e.g., T cells to respond to ROR1-expressing cells.

[0570] In some aspects, a CAR of the present disclosure (i.e., a CAR comprising a CAR spacer of the present disclosure, i.e., a hinge derived CAR spacer, a loop derived CAR spacer, or a combination thereof) inhibiting ROR1 includes an anti-ROR1 monoclonal antibody called UC-961 (Cirmtuzumab) o an antigen-binding portion thereof. See, e.g., Clinical Trial Identifier No. NCT02222688. Cirmtuzumab can be used to treat cancers, such as chronic lymphocytic leukemia (CLL), ovarian cancer, and melanoma. See, e.g., Hojjat-Farsangi et al. PLoS One. 8(4): e61167; and NCT02222688.

[0571] In some aspects, a CAR of the present disclosure (i.e., a CAR comprising a CAR spacer of the present disclosure, i.e., a hinge derived CAR spacer, a loop derived CAR spacer, or a combination thereof) inhibiting CD19 includes an anti-CD19 antibody or antigen-binding portion thereof.

[0572] In some aspects, a CAR of the present disclosure (i.e., a CAR comprising a CAR spacer of the present disclosure, i.e., a hinge derived CAR spacer, a loop derived CAR spacer, or a combination thereof) inhibiting Her2 includes an anti-Her2 antibody or antigen-binding portion thereof.

### Signaling, Transmembrane, Costimulatory Domains

[0573] In some aspects, the intracellular domain of a CAR of the present disclosure (i.e., CAR comprising a CAR spacer of the present disclosure, i.e., a hinge derived CAR spacer, a loop derived CAR spacer, or a combination thereof) is a signaling domain derived from CD3zeta, FcR gamma, FcR beta, CD3 gamma, CD3 delta, CD3 epsilon, CD5, CD22, CD79a, CD79b, and CD66d. In some aspect, the CAR further comprises a co-stimulatory domain derived from 2B4, HVEM, ICOS, LAG3, DAP10, DAP12, CD27, CD28, 4-1BB (CD137), OX40 (CD134), CD30, CD40, ICOS (CD278), glucocorticoid-induced tumor necrosis factor receptor (GITR), lymphocyte function-associated antigen-1 (LFA-1), CD2, CD7, LIGHT, NKG2C, or B7-H3. In some aspects, the CAR further comprises a 4-11BB costimulatory domain. In some aspects, the 4-1BB costimulatory domain comprises SEQ ID NO: 4869.

[0574] In some aspects, the CAR of the present disclosure (i.e., CAR comprising a CAR spacer of the present disclosure, i.e., a hinge derived CAR spacer, a loop derived CAR spacer, or a combination thereof) comprises a transmembrane domain of a protein selected from the group consisting of the alpha, beta or zeta chain of the T-cell receptor, CD28, CD3 epsilon, CD45, CD4, CD5, CD8, CD9, CD16, CD22, CD33, CD37, CD64, CD80, CD86, CD134, CD137 and CD154. The transmembrane domain may be derived either from a natural or from a recombinant source. Where the source is natural, the domain may be derived from any membrane-bound or transmembrane protein. In some aspects, the transmembrane domain is capable of signaling to the intracellular domain(s) whenever the CAR of the present disclosure has bound to a target.

[0575] In some aspects, a transmembrane domain can include at least the transmembrane region(s) of, e.g., KIRDS2, OX40, CD2, CD27, LFA-1 (CD11a, CD18), ICOS (CD278), 4-1BB (CD137), GITR, CD40, BAFFR, HVEM (LIGHTR), SLAMF7, NKp80 (KLRF1), NKp44, NKp30, NKp46, CD160, CD19, IL2R beta, IL2R gamma, IL7Rα, ITGA1, VLA1, CD49a, ITGA4, IA4, CD49D, ITGA6, VLA-6, CD49f, ITGAD, CD11d, ITGAE, CD103, ITGAL, CD11a, LFA-1, ITGAM, CD11b, ITGAX, CD11c, ITGB1, CD29, ITGB2, CD18, LFA-1, ITGB7, TNFR2, DNAM1 (CD226), SLAMF4 (CD244, 2B4), CD84, CD96 (Tactile), CEACAM1, CRTAM, Ly9 (CD229), CD160 (BY55), PSGL1, CD100 (SEMA4D), SLAMF6 (NTB-A, Ly108), SLAM (SLAMF1, CD150, IPO-3), BLAME (SLAMF8), SELPLG (CD162), LTBR, PAG/Cbp, NKG2D, NKG2C, or CD19.

[0576] In some aspects, the CAR of the present disclosure (i.e., CAR comprising a CAR spacer of the present disclosure, i.e., a hinge derived CAR spacer, a loop derived CAR spacer, or a combination thereof) further comprises a sequence encoding a costimulatory domain, e.g., a costimulatory domain described herein. In some aspects, the costimulatory domain comprises a functional signaling domain of a protein selected from the group consisting of OX40, CD2, CD27, CD28, CDS, ICAM-1, LFA-1 (CD11a/CD18), ICOS (CD278), and 4-1BB (CD137). In some aspects, the costimulatory domain comprises a functional signaling domain of a protein selected from the group consisting of MHC class I molecule, TNF receptor proteins, Immunoglobulin-like proteins, cytokine receptors, integrins, signaling lymphocytic activation molecules (SLAM proteins), activating NK cell receptors, BTLA, a Toll ligand receptor, OX40, CD2, CD7, CD27, CD28, CD30, CD40, CDS, ICAM-1, LFA-1 (CD11a/CD18), 4-1BB (CD137), B7-H3, CDS, ICAM-1, ICOS (CD278), GITR, BAFFR, LIGHT, HVEM (LIGHTR), KIRDS2, SLAMF7, NKp80 (KLRF1), NKp44, NKp30, NKp46, CD19, CD4, CD8alpha, CD8beta, IL2R beta, IL2R gamma, IL7R alpha, ITGA4, VLA1, CD49a, ITGA4, IA4, CD49D, ITGA6, VLA-6, CD49f, ITGAD, CD11d, ITGAE, CD103, ITGAL, CD11a, LFA-1, ITGAM, CD11b, ITGAX, CD11c, ITGB1, CD29, ITGB2, CD18, LFA-1, ITGB7, NKG2D, NKG2C, TNFR2, TRANCE/RANKL, DNAM1 (CD226), SLAMF4 (CD244, 2B4), CD84, CD96 (Tactile), CEACAM1, CRTAM, Ly9 (CD229), CD160 (BY55), PSGL1, CD100 (SEMA4D), CD69, SLAMF6 (NTB-A, Ly108), SLAM (SLAMF1, CD150, IPO-3), BLAME (SLAMF8), SELPLG (CD162), LTBR, LAT, GADS, SLP-76, PAG/Cbp, CD19a, and a ligand that specifically binds with CD83. In some aspects, the costimulatory domain comprises 4-1BB, CD27, CD28, or ICOS.

[0577] In some aspects, the CAR of the present disclosure (i.e., CAR comprising a CAR spacer of the present disclosure, i.e., a hinge derived CAR spacer, a loop derived CAR spacer, or a combination thereof) further comprises a sequence encoding an intracellular signaling domain, e.g., an intracellular signaling domain described herein. In some aspects, the intracellular signaling domain comprises a functional signaling domain of 4-1BB and/or a functional signaling domain of CD3 zeta. In some aspects, the intracellular signaling domain comprises a functional signaling domain of CD27 and/or a functional signaling domain of CD3 zeta.

[0578] In some aspects, the CAR of the present disclosure (i.e., CAR comprising a CAR spacer of the present disclosure, i.e., a hinge derived CAR spacer, a loop derived CAR spacer, or a combination thereof) further comprises a leader sequence. In some aspects, the intracellular signaling domain comprises CD3z comprising SEQ ID NO: 4870.

[0579] In some aspects, the CAR of the present disclosure (i.e., CAR comprising a CAR spacer of the present disclosure, i.e., a hinge derived CAR spacer, a loop derived CAR spacer, or a combination thereof) comprises an optional leader sequence (e.g., an optional leader sequence described herein), an extracellular antigen-binding domain, a CAR spacer of the present disclosure, a transmembrane domain (e.g., transmembrane domain described herein), and an intracellular stimulatory domain (e.g., intracellular stimulatory domain described herein).

[0580] In some aspects, an exemplary CAR construct of the present disclosure comprises an optional leader sequence (e.g., a leader sequence described herein), an extracellular antigen-binding domain, a hinge, a transmembrane domain, an intracellular costimulatory domain (e.g., an intracellular costimulatory domain described herein) and an intracellular stimulatory domain.

[0581] In some aspects, the transmembrane domain of a CAR of the present disclosure (e.g., a CAR targeting ROR1, CD19 or Her 2) comprises a transmembrane domain is which linked to the intracellular domain of the CAR by a linker.

[0582] In some aspects, the present disclosure provides a CAR comprising: (i) an R12 scFv comprising SEQ ID NO: 4875; (ii) a Gly-Ser linker of SEQ ID NO:4818 or 5088, (iii) Spacer 1 comprising or consisting of SEQ ID NO:4830, (iv) a transmembrane domain comprising SEQ ID NO: 4868 and optionally (v) a 4-1BB costimulatory domain comprising SEQ ID NO: 4869. In some aspects, the CAR further comprises (vi) CD3z comprising SEQ ID NO: 4870; (vii) P2A comprising SEQ ID NO: 4871; (viii) EGFRt comprising SEQ ID NO: 4872 or any combination thereof.

[0583] In some aspects, the present disclosure provides a CAR comprising: (i) an R12 scFv comprising SEQ ID NO: 4875; (ii) a Gly-Ser linker of SEQ ID NO:4818 or 5088, (iii) Spacer 15 comprising or consisting of SEQ ID NO:4843, (iv) a transmembrane domain comprising SEQ ID NO: 4868 and optionally (v) a 4-1BB costimulatory domain comprising SEQ ID NO: 4869. In some aspects, the CAR further comprises (vi) CD3z comprising SEQ ID NO: 4870; (vii) P2A comprising SEQ ID NO: 4871; (viii) EGFRt comprising SEQ ID NO: 4872, or any combination thereof.

[0584] In some aspects, the present disclosure provides a CAR comprising: (i) an R12 scFv comprising SEQ ID NO: 4875; (ii) a Gly-Ser linker of SEQ ID NO:4818 or 5088, (iii) Spacer 21 comprising or consisting of SEQ ID NO:4849, (iv) a transmembrane domain comprising SEQ ID NO: 4868 and optionally (v) a 4-1BB costimulatory domain comprising SEQ ID NO: 4869. In some aspects, the CAR further comprises (vi) CD3z comprising SEQ ID NO: 4870; (vii) P2A comprising SEQ ID NO: 4871; (viii) EGFRt comprising SEQ ID NO: 4872, or any combination thereof.

[0585] In some aspects, the present disclosure provides a CAR comprising: (i) an R11 scFv comprising SEQ ID NO: 5048; (ii) a Gly-Ser linker of SEQ ID NO:4818 or 5088, (iii) Spacer 4 comprising or consisting of SEQ ID NO:4833, (iv) a transmembrane domain comprising SEQ ID NO: 4868 and optionally (v) a 4-1BB costimulatory domain comprising SEQ ID NO: 4869. In some aspects, the CAR further comprises (vi) CD3z comprising SEQ ID NO: 4870; (vii) P2A comprising SEQ ID NO: 4871; (viii) EGFRt comprising SEQ ID NO: 4872, or any combination thereof.

[0586] In some aspects, the present disclosure comprises provides a CAR comprising: (i) an R11 scFv comprising SEQ ID NO: 5048; (ii) a Gly-Ser linker of SEQ ID NO:4818 or 5088, (iii) Spacer 5 comprising or consisting of SEQ ID NO:4834, (iv) a transmembrane domain comprising SEQ ID NO: 4868 and optionally (v) a 4-1BB costimulatory domain comprising SEQ ID NO: 4869. In some aspects, the CAR further comprises (vi) CD3z comprising SEQ ID NO: 4870; (vii) P2A comprising SEQ ID NO: 4871; (viii) EGFRt comprising SEQ ID NO: 4872, or any combination thereof.

[0587] In some aspects, the present disclosure provides a CAR comprising: (i) an R11 scFv comprising SEQ ID NO: 5048; (ii) a Gly-Ser linker of SEQ ID NO:4818 or 5088, (iii) Spacer 6 comprising or consisting of SEQ ID NO:4835, (iv) a transmembrane domain comprising SEQ ID NO: 4868 and optionally (v) a 4-1BB costimulatory domain comprising SEQ ID NO: 4869. In some aspects, the CAR further comprises (vi) CD3z comprising SEQ ID NO: 4870; (vii) P2A comprising SEQ ID NO: 4871; (viii) EGFRt comprising SEQ ID NO: 4872, or any combination thereof.

[0588] In some aspects, the present disclosure provides a CAR comprising: (i) a 2A2 scFv comprising SEQ ID NO: 5047; (ii) a Gly-Ser linker of SEQ ID NO:4818 or 5088, (iii) Spacer 13 comprising or consisting of SEQ ID NO:4841, (iv) a transmembrane domain comprising SEQ ID NO: 4868 and optionally (v) a 4-1BB costimulatory domain comprising SEQ ID NO: 4869. In some aspects, the CAR further comprises (vi) CD3z comprising SEQ ID NO: 4870; (vii) P2A comprising SEQ ID NO: 4871; (viii) EGFRt comprising SEQ ID NO: 4872, or any combination thereof.

[0589] In some aspects, the present disclosure provides a CAR comprising: (i) a 2A2 scFv comprising SEQ ID NO: 5047; (ii) a Gly-Ser linker of SEQ ID NO:4818 or 5088, (iii) Spacer 21 comprising or consisting of SEQ ID NO:4889, (iv) a transmembrane domain comprising SEQ ID NO: 4868 and optionally (v) a 4-1BB costimulatory domain comprising SEQ ID NO: 4869. In some aspects, the CAR further comprises (vi) CD3z comprising SEQ ID NO: 4870; (vii) P2A comprising SEQ ID NO: 4871; (viii) EGFRt comprising SEQ ID NO: 4872, or any combination thereof.

[0590] In some aspects, the present disclosure provides a CAR comprising: (i) a 2A2 scFv comprising SEQ ID NO: 5047; (ii) a Gly-Ser linker of SEQ ID NO:4818 or 5088, (iii) Spacer 28 comprising or consisting of SEQ ID NO:4856, (iv) a transmembrane domain comprising SEQ ID NO: 4868 and optionally (v) a 4-1BB costimulatory domain comprising SEQ ID NO: 4869. In some aspects, the CAR further comprises (vi) CD3z comprising SEQ ID NO: 4870; (vii) P2A comprising SEQ ID NO: 4871; (viii) EGFRt comprising SEQ ID NO: 4872, or any combination thereof.

[0591] In some aspects, the present disclosure provides a CAR comprising: (i) an R12 scFv comprising SEQ ID NO: 4875; (ii) a Gly-Ser linker of SEQ ID NO:4818 or 5088, (iii) a spacer derived from a human immunoglobulin hinge and/or constant region or a functional fragment thereof, (iv) a transmembrane domain comprising SEQ ID NO: 4868 and optionally (v) a 4-1BB costimulatory domain comprising SEQ ID NO: 4869, wherein the combined length of the linker (ii) and spacer (iii) is between 35 Å and 55 Å. In some aspects, the CAR further comprises (vi) CD3z comprising SEQ ID NO: 4870; (vii) P2A comprising SEQ ID NO: 4871; (viii) EGFRt comprising SEQ ID NO: 4872, or any combination thereof.

[0592] In some aspects, the present disclosure provides a CAR comprising: (i) an R12 scFv comprising SEQ ID NO: 4875; (ii) a Gly-Ser linker of SEQ ID NO:4818 or 5088, (iii) a spacer derived from a human immunoglobulin hinge and/or constant region or a functional fragment thereof, (iv) a transmembrane domain comprising SEQ ID NO: 4868 and optionally (v) a 4-1BB costimulatory domain comprising SEQ ID NO: 4869, wherein the combined length of the linker (ii) and spacer (iii) is about 45 Å. In some aspects, the CAR further comprises (vi) CD3z comprising SEQ ID NO: 4870; (vii) P2A comprising SEQ ID NO: 4871; (viii) EGFRt comprising SEQ ID NO: 4872, or any combination thereof.

[0593] In some aspects, the present disclosure provides a CAR comprising: (i) an R11 scFv comprising SEQ ID NO: 5048; (ii) a Gly-Ser linker of SEQ ID NO:4818 or 5088, (iii) a spacer derived from a human immunoglobulin hinge and/or constant region or a functional fragment thereof, (iv) a transmembrane domain comprising SEQ ID NO: 4868 and optionally (v) a 4-1BB costimulatory domain comprising SEQ ID NO: 4869, wherein the combined length of the linker (ii) and spacer (iii) is between 180 Å and 250 Å. In some aspects, the CAR further comprises (vi) CD3z comprising SEQ ID NO: 4870; (vii) P2A comprising SEQ ID NO: 4871; (viii) EGFRt comprising SEQ ID NO: 4872, or any combination thereof.

[0594] In some aspects, the present disclosure provides a CAR comprising: (i) an R11 scFv comprising SEQ ID NO: 5048; (ii) a Gly-Ser linker of SEQ ID NO:4818 or 5088, (iii) a spacer derived from a human immunoglobulin hinge and/or constant region or a functional fragment thereof, (iv) a transmembrane domain comprising SEQ ID NO: 4868 and optionally (v) a 4-1BB costimulatory domain comprising SEQ ID NO: 4869, wherein the combined length of the linker (ii) and spacer (iii) is about 200 Å. In some aspects, the CAR further comprises (vi) CD3z comprising SEQ ID NO: 4870; (vii) P2A comprising SEQ ID NO: 4871; (viii) EGFRt comprising SEQ ID NO: 4872, or any combination thereof.

[0595] In some aspects, the present disclosure provides a CAR comprising: (i) a 2A2 scFv comprising SEQ ID NO: 5047; (ii) a Gly-Ser linker of SEQ ID NO:4818 or 5088, (iii) a spacer derived from a human immunoglobulin hinge and/or constant region or a functional fragment thereof, (iv) a transmembrane domain comprising SEQ ID NO: 4868 and optionally (v) a 4-1BB costimulatory domain comprising SEQ ID NO: 4869, wherein the combined length of the linker (ii) and spacer (iii) is between 35 Å and 55 Å. In some aspects, the CAR further comprises (vi) CD3z comprising SEQ ID NO: 4870; (vii) P2A comprising SEQ ID NO: 4871; (viii) EGFRt comprising SEQ ID NO: 4872, or any combination thereof.

[0596] In some aspects, the present disclosure provides a CAR comprising: (i) a 2A2 scFv comprising SEQ ID NO: 5047; (ii) a Gly-Ser linker of SEQ ID NO:4818 or 5088, (iii) a spacer derived from a human immunoglobulin hinge and/or constant region or a functional fragment thereof, (iv) a transmembrane domain comprising SEQ ID NO: 4868 and optionally (v) a 4-1BB costimulatory domain comprising SEQ ID NO: 4869, wherein the combined length of the linker (ii) and spacer (iii) is about 45 Å. In some aspects, the CAR further comprises (vi) CD3z comprising SEQ ID NO: 4870; (vii) P2A comprising SEQ ID NO: 4871; (viii) EGFRt comprising SEQ ID NO: 4872, or any combination thereof.

[0597] In some aspects, the present disclosure provides a CAR comprising, consisting, or consisting essentially of a sequence set forth in SEQ ID NOS: 5049 to 5063.

[0598] In some aspects, the present disclosure provides a polynucleotide sequence encoding a CAR comprising: (i) an R12 scFv comprising SEQ ID NO: 4875; (ii) a Gly-Ser linker of SEQ ID NO:4818 or 5088, (iii) Spacer 1 comprising or consisting of SEQ ID NO:4830, (iv) a transmembrane domain comprising SEQ ID NO: 4868 and optionally (v) a 4-1BB costimulatory domain comprising SEQ ID NO: 4869. In some aspects, the CAR further comprises (vi) CD3z comprising SEQ ID NO: 4870; (vii) P2A comprising SEQ ID NO: 4871; (viii) EGFRt comprising SEQ ID NO: 4872, or any combination thereof.

[0599] In some aspects, the present disclosure provides a polynucleotide sequence encoding a CAR comprising: (i) an R12 scFv comprising SEQ ID NO: 4875; (ii) a Gly-Ser linker of SEQ ID NO:4818 or 5088, (iii) Spacer 15 comprising or consisting of SEQ ID NO:4843, (iv) a transmembrane domain comprising SEQ ID NO: 4868 and optionally (v) a 4-1BB costimulatory domain comprising SEQ ID NO: 4869. In some aspects, the CAR further comprises (vi) CD3z comprising SEQ ID NO: 4870; (vii) P2A comprising SEQ ID NO: 4871; (viii) EGFRt comprising SEQ ID NO: 4872, or any combination thereof.

[0600] In some aspects, the present disclosure provides a polynucleotide sequence encoding a CAR comprising: (i) an R12 scFv comprising SEQ ID NO: 4875; (ii) a Gly-Ser linker of SEQ ID NO:4818 or 5088, (iii) Spacer 21 comprising or consisting of SEQ ID NO:4849, (iv) a transmembrane domain comprising SEQ ID NO: 4868 and optionally (v) a 4-1BB costimulatory domain comprising SEQ ID NO: 4869. In some aspects, the CAR further comprises (vi) CD3z comprising SEQ ID NO: 4870; (vii) P2A comprising SEQ ID NO: 4871; (viii) EGFRt comprising SEQ ID NO: 4872, or any combination thereof.

[0601] In some aspects, the present disclosure provides a polynucleotide sequence encoding a CAR comprising: (i) an R11 scFv comprising SEQ ID NO: 5048; (ii) a Gly-Ser linker of SEQ ID NO:4818 or 5088, (iii) Spacer 4 comprising or consisting of SEQ ID NO:4833, (iv) a transmembrane domain comprising SEQ ID NO: 4868 and optionally (v) a 4-1BB costimulatory domain comprising SEQ ID NO: 4869. In some aspects, the CAR further comprises (vi) CD3z comprising SEQ ID NO: 4870; (vii) P2A comprising SEQ ID NO: 4871; (viii) EGFRt comprising SEQ ID NO: 4872, or any combination thereof.

[0602] In some aspects, the present disclosure provides a polynucleotide sequence encoding a CAR comprising: (i) an R11 scFv comprising SEQ ID NO: 5048; (ii) a Gly-Ser linker of SEQ ID NO:4818 or 5088, (iii) Spacer 5 comprising or consisting of SEQ ID NO:4834, (iv) a transmembrane domain comprising SEQ ID NO: 4868 and optionally (v) a 4-1BB costimulatory domain comprising SEQ ID NO: 4869. In some aspects, the CAR further comprises (vi) CD3z comprising SEQ ID NO: 4870; (vii) P2A comprising SEQ ID NO: 4871; (viii) EGFRt comprising SEQ ID NO: 4872, or any combination thereof.

[0603] In some aspects, the present disclosure provides a polynucleotide sequence encoding a CAR comprising: (i) an R11 scFv comprising SEQ ID NO: 5048; (ii) a Gly-Ser linker of SEQ ID NO:4818 or 5088, (iii) Spacer 6 comprising or consisting of SEQ ID NO:4835, (iv) a transmembrane domain comprising SEQ ID NO: 4868 and optionally (v) a 4-1BB costimulatory domain comprising SEQ ID NO: 4869. In some aspects, the CAR further comprises (vi) CD3z comprising SEQ ID NO: 4870; (vii) P2A comprising SEQ ID NO: 4871; (viii) EGFRt comprising SEQ ID NO: 4872, or any combination thereof.

[0604] In some aspects, the present disclosure provides a polynucleotide sequence encoding a CAR comprising: (i) a 2A2 scFv comprising SEQ ID NO: 5047; (ii) a Gly-Ser linker of SEQ ID NO:4818 or 5088, (iii) Spacer 13 comprising or consisting of SEQ ID NO:4841, (iv) a transmembrane domain comprising SEQ ID NO: 4868 and optionally (v) a 4-1BB costimulatory domain comprising SEQ ID NO: 4869. In some aspects, the CAR further comprises (vi) CD3z comprising SEQ ID NO: 4870; (vii) P2A comprising SEQ ID NO: 4871; (viii) EGFRt comprising SEQ ID NO: 4872, or any combination thereof.

[0605] In some aspects, the present disclosure provides a polynucleotide sequence encoding a CAR comprising: (i) a 2A2 scFv comprising SEQ ID NO: 5047; (ii) a Gly-Ser linker of SEQ ID NO:4818 or 5088, (iii) Spacer 21 comprising or consisting of SEQ ID NO:4889, (iv) a transmembrane domain comprising SEQ ID NO: 4868 and optionally (v) a 4-1BB costimulatory domain comprising SEQ ID NO: 4869. In some aspects, the CAR further comprises (vi) CD3z comprising SEQ ID NO: 4870; (vii) P2A comprising SEQ ID NO: 4871; (viii) EGFRt comprising SEQ ID NO: 4872, or any combination thereof.

[0606] In some aspects, the present disclosure provides a polynucleotide sequence encoding a CAR comprising: (i) 2A2 scFv comprising SEQ ID NO: 5047; (ii) a Gly-Ser linker of SEQ ID NO:4818 or 5088, (iii) Spacer 28 comprising or consisting of SEQ ID NO:4856, (iv) a transmembrane domain comprising SEQ ID NO: 4868 and optionally (v) a 4-1BB costimulatory domain comprising SEQ ID NO: 4869. In some aspects, the CAR further comprises (vi) CD3z comprising SEQ ID NO: 4870; (vii) P2A comprising SEQ ID NO: 4871; (viii) EGFRt comprising SEQ ID NO: 4872, or any combination thereof.

[0607] In some aspects, the present disclosure provides a polynucleotide sequence encoding a CAR comprising: (i) an R12 scFv comprising SEQ ID NO: 4875; (ii) a Gly-Ser linker of SEQ ID NO:4818 or 5088, (iii) a spacer derived from a human immunoglobulin hinge and/or constant region or a functional fragment thereof, (iv) a transmembrane domain comprising SEQ ID NO: 4868 and optionally (v) a 4-1BB costimulatory domain comprising SEQ ID NO: 4869, wherein the combined length of the linker (ii) and spacer (iii) is between 35 Å and 55 Å. In some aspects, the CAR comprises (vi) CD3z comprising SEQ ID NO: 4870; (vii) P2A comprising SEQ ID NO: 4871; (viii) EGFRt comprising SEQ ID NO: 4872, or any combination thereof.

[0608] In some aspects, the present disclosure provides a polynucleotide sequence encoding a CAR comprising: (i) an R12 scFv comprising SEQ ID NO: 4875; (ii) a Gly-Ser linker of SEQ ID NO:4818 or 5088, (iii) a spacer derived from a human immunoglobulin hinge and/or constant region or a functional fragment thereof, (iv) a transmembrane domain comprising SEQ ID NO: 4868 and optionally (v) a 4-1BB costimulatory domain comprising SEQ ID NO: 4869, wherein the combined length of the linker (ii) and spacer (iii) is about 45 Å. In some aspects, the CAR further comprises (vi) CD3z comprising SEQ ID NO: 4870; (vii) P2A comprising SEQ ID NO: 4871; (viii) EGFRt comprising SEQ ID NO: 4872, or any combination thereof.

[0609] In some aspects, the present disclosure provides a polynucleotide sequence encoding a CAR comprising: (i) an R11 scFv comprising SEQ ID NO: 5048; (ii) a Gly-Ser linker of SEQ ID NO:4818 or 5088, (iii) a spacer derived from a human immunoglobulin hinge and/or constant region or a functional fragment thereof, (iv) a transmembrane domain comprising SEQ ID NO: 4868 and optionally (v) a 4-1BB costimulatory domain comprising SEQ ID NO: 4869, wherein the combined length of the linker (ii) and spacer (iii) is between 180 Å and 250 Å. In some aspects, the CAR further comprises (vi) CD3z comprising SEQ ID NO: 4870; (vii) P2A comprising SEQ ID NO: 4871; (viii) EGFRt comprising SEQ ID NO: 4872, or any combination thereof.

[0610] In some aspects, the present disclosure provides a polynucleotide sequence encoding a CAR comprising: (i) an R11 scFv comprising SEQ ID NO: 5048; (ii) a Gly-Ser linker of SEQ ID NO:4818 or 5088, (iii) a spacer derived from a human immunoglobulin hinge and/or constant region or a functional fragment thereof, (iv) a transmembrane domain comprising SEQ ID NO: 4868 and optionally (v) a 4-1BB costimulatory domain comprising SEQ ID NO: 4869, wherein the combined length of the linker (ii) and spacer (iii) is about 200 Å. In some aspects, the CAR further comprises (vi) CD3z comprising SEQ ID NO: 4870; (vii) P2A comprising SEQ ID NO: 4871; (viii) EGFRt comprising SEQ ID NO: 4872, or any combination thereof.

[0611] In some aspects, the present disclosure provides a polynucleotide sequence encoding a CAR comprising: (i) 2A2 scFv comprising SEQ ID NO: 5047; (ii) a Gly-Ser linker of SEQ ID NO:4818 or 5088, (iii) a spacer derived from a human immunoglobulin hinge and/or constant region or a functional fragment thereof, (iv) a transmembrane domain comprising SEQ ID NO: 4868 and optionally (v) a 4-1BB costimulatory domain comprising SEQ ID NO: 4869, wherein the combined length of the linker (ii) and spacer (iii) is between 35 Å and 55 Å. In some aspects, the CAR further comprises (vi) CD3z comprising SEQ ID NO: 4870; (vii) P2A comprising SEQ ID NO: 4871; (viii) EGFRt comprising SEQ ID NO: 4872, or any combination thereof.

[0612] In some aspects, the present disclosure provides a polynucleotide sequence encoding a CAR comprising: (i) 2A2 scFv comprising SEQ ID NO: 5047; (ii) a Gly-Ser linker of SEQ ID NO:4818 or 5088, (iii) a spacer derived from a human immunoglobulin hinge and/or constant region or a functional fragment thereof, (iv) a transmembrane domain comprising SEQ ID NO: 4868 and optionally (v) a 4-1BB costimulatory domain comprising SEQ ID NO: 4869, wherein the combined length of the linker (ii) and spacer (iii) is about 45 Å. In some aspects, the CAR further comprises (vi) CD3z comprising SEQ ID NO: 4870; (vii) P2A comprising SEQ ID NO: 4871; (viii) EGFRt comprising SEQ ID NO: 4872, or any combination thereof.

[0613] In some aspects, the present disclosure provides a polynucleotide sequence encoding a CAR comprising, consisting, or consisting essentially of a protein sequence set forth in SEQ ID NOS: 5049 to 5063.

### Bispecific CARs

[0614] In some aspects, the CARs of the present disclosure are bispecific CARs. Accordingly, in some aspects, the polynucleotide encoding a CAR of the present disclosure encodes at least a polypeptide of a bispecific CAR (e.g., a CAR targeting a first antigen and second antigen).

[0615] In some aspects, the antigen-binding domain of a CAR of the present disclosure is a bispecific antibody molecule. A bispecific antibody has specificity for no more than two antigens. A bispecific antibody molecule is characterized by a first immunoglobulin variable domain sequence which has binding specificity for a first epitope and a second immunoglobulin variable domain sequence that has binding specificity for a second epitope. In some aspects, the first and second epitopes are on the same antigen, e.g., the same protein (or subunit of a multimeric protein). In some aspects, the first and second epitopes overlap. In other aspects, the first and second epitopes do not overlap. In some aspects, the first and second epitopes are on different antigens, e.g., different proteins (or different subunits of a multimeric protein).

[0616] In some aspects, a bispecific antibody molecule comprises a heavy chain variable domain sequence and a light chain variable domain sequence which have binding specificity for a first epitope and a heavy chain variable domain sequence and a light chain variable domain sequence which have binding specificity for a second epitope. In some aspects, a bispecific antibody molecule comprises a half antibody having binding specificity for a first epitope and a half antibody having binding specificity for a second epitope. In some aspects, a bispecific antibody molecule comprises a half antibody, or fragment thereof, having binding specificity for a first epitope and a half antibody, or fragment thereof, having binding specificity for a second epitope. In some aspects, a bispecific antibody molecule comprises a scFv, or fragment thereof, have binding specificity for a first epitope and a scFv, or fragment thereof, have binding specificity for a second epitope.

[0617] In certain aspects, the antibody molecule is a multi-specific (e.g., a bispecific or a trispecific) antibody molecule. Protocols for generating bispecific or heterodimeric antibody molecules are known in the art.

[0618] Within each antibody or antigen-binding antibody fragment (e.g., scFv) of a bispecific antibody molecule, the VH can be upstream or downstream of the VL. In some aspects, the upstream antibody or antibody fragment (e.g., scFv) is arranged with its VH (VH₁) upstream of its VL (VL₁) and the downstream antibody or antibody fragment (e.g., scFv) is arranged with its VL (VL₂) upstream of its VH (VH₂), such that the overall bispecific antibody molecule has the arrangement VH₁-VL₁-VL₂-VH₂. In other aspects, the upstream antibody or antibody fragment (e.g., scFv) is arranged with its VL (VL₁) upstream of its VH (VH₁) and the downstream antibody or antibody fragment (e.g., scFv) is arranged with its VH (VH₂) upstream of its VL (VL₂), such that the overall bispecific antibody molecule has the arrangement VL₁-VH₁-VH₂-VL₂. Optionally, a linker is disposed between the two antibodies or antibody fragments (e.g., scFvs), e.g., between VL₁ and VL₂ if the construct is arranged as VH₁-VL₁-VL₂-VH₂, or between VH₁ and VH₂ if the construct is arranged as VL₁-VH₁-VH₂-VL₂. The linker may be a linker as described herein, e.g., a (Gly₄Ser)n linker, wherein n is 1, 2, 3, 4, 5, or 6, e.g., 4 (SEQ ID NO: 83). In general, the linker between the two scFvs should be long enough to avoid mispairing between the domains of the two scFvs. Optionally, a linker is disposed between the VL and VH of the first scFv. Optionally, a linker is disposed between the VL and VH of the second scFv. In constructs that have multiple linkers, any two or more of the linkers can be the same or different. Accordingly, in some aspects, a bispecific CAR comprises VLs, VHs, and optionally one or more linkers in an arrangement as described herein.

[0619] In some aspects, the antibody molecule is a bispecific antibody molecule having a first epitope located on a first tumor antigen (e.g., ROR1) and a second epitope located on a second antigen, e.g., CD10, CD19, CD20, CD22, CD34, CD123, FLT-3, ROR1, CD79b, CD179b, or CD79a. In some aspects, the bispecific antibody binds to a first epitope, wherein the first epitope is located on CD19, and to a second epitope, wherein the second epitope is located on CD20. In some aspects, the bispecific antibody binds to a first epitope, wherein the first epitope is located on CD19, and to a second epitope, wherein the second epitope is located on CD22. In some aspects, the bispecific antibody binds to a first epitope, wherein the first epitope is located on CD20, and to a second epitope, wherein the second epitope is located on CD22.In certain aspects, the antibody molecule is a bispecific antibody molecule having a first binding specificity for a first B-cell epitope and a second binding specificity for another B-cell antigen. For instance, in some embodiments the bispecific antibody molecule has a first binding specificity for a first B-cell epitope, e.g., for ROR1, and a second binding specificity for one or more of CD10, CD19, CD20, CD22, CD34, CD123, FLT-3, ROR1, CD79b, CD179b, or CD79a B-cell epitopes.

### Inducible CARs

[0620] In some aspects, the expression of a CAR of the present disclosure (i.e., CAR comprising a CAR spacer of the present disclosure, i.e., a hinge derived CAR spacer, a loop derived CAR spacer, or a combination thereof) is regulated by a constitutive promoter, e.g., immediate early cytomegalovirus (CMV) promoter, Elongation Growth Factor-1a (EF-1a), simian virus 40 (SV40) early promoter, mouse mammary tumor virus (MMTV), human immunodeficiency virus (HIV) long terminal repeat (LTR) promoter, MoMuLV promoter, an avian leukemia virus promoter, an Epstein-Barr virus immediate early promoter, a Rous sarcoma virus promoter, as well as human gene promoters such as, but not limited to, the actin promoter, the myosin promoter, the hemoglobin promoter, and the creatine kinase promoter. However, the regulation of the expression of a CAR of the present disclosure is not limited to the use of a constitutive promoter.

[0621] Thus, in some aspects, the CAR of the present disclosure encoded by a polynucleotide disclosed herein is an inducible CAR. The term “inducible” refers to the presence of an “inducible promoter,” i.e., a nucleotide sequence which, when operably linked with a polynucleotide which encodes or specifies a gene product, e.g., a CAR of the present disclosure, causes the gene product to be produced in a cell substantially only when an inducer which corresponds to the promoter is present in the cell. The use of an inducible promoter provides a molecular switch capable of turning on expression of the polynucleotide sequence which it is operatively linked when such expression is desired, or turning off the expression when expression is not desired. Examples of inducible promoters include, but are not limited to a metallothionine promoter, a glucocorticoid promoter, a progesterone promoter, and a tetracycline promoter.

[0622] In other aspects, a polynucleotide encoding a CAR of the present disclosure comprises a “tissue-specific” promoter, i.e., a nucleotide sequence which, when operably linked with a polynucleotide which encodes or specifies a gene product, e.g., a CAR of the present disclosure, causes the gene product to be produced in a cell substantially only if the cell is a cell of the tissue type corresponding to the promoter.

### Vectors

[0623] The present disclosure also provides a vector comprising a polynucleotide encoding a CAR of the present disclosure (i.e., CAR comprising a CAR spacer of the present disclosure, i.e., a hinge derived CAR spacer, a loop derived CAR spacer, or a combination thereof) operably linked to a regulatory element. In some aspects, the polynucleotide encoding a CAR of the present disclosure is a DNA molecule, or a RNA molecule.

[0624] In some aspects, the vector is a transfer vector. The term “transfer vector” refers to a composition of matter which comprises an isolated nucleic acid (e.g., a polynucleotide of the present disclosure) and which can be used to deliver the isolated nucleic acid to the interior of a cell. Numerous vectors are known in the art including, but not limited to, linear polynucleotides, polynucleotides associated with ionic or amphiphilic compounds, plasmids, and viruses. Thus, the term “transfer vector” includes an autonomously replicating plasmid or a virus. The term should also be construed to further include non-plasmid and non-viral compounds which facilitate transfer of nucleic acid into cells, such as, for example, a polylysine compound, liposome, and the like. Examples of viral transfer vectors include, but are not limited to, adenoviral vectors, adeno-associated virus vectors, retroviral vectors, lentiviral vectors, and the like.

[0625] In some aspects, the vector is an expression vector. The term “expression vector” refers to a vector comprising a recombinant polynucleotide (e.g., a polypeptide of the present disclosure) comprising expression control sequences operatively linked to a nucleotide sequence to be expressed. An expression vector comprises sufficient cis-acting elements for expression; other elements for expression can be supplied by the host cell or in an in vitro expression system. Expression vectors include all those known in the art, including cosmids, plasmids (e.g., naked or contained in liposomes) and viruses (e.g., lentiviruses, retroviruses, adenoviruses, and adeno-associated viruses) that incorporate the recombinant polynucleotide.

[0626] In some aspects, the vector is a viral vector, a mammalian vector, or bacterial vector. In some aspects, the vector is selected from the group consisting of an adenoviral vector, a lentivirus, a Sendai virus vector, a baculoviral vector, an Epstein Barr viral vector, a papovaviral vector, a vaccinia viral vector, a herpes simplex viral vector, a hybrid vector, and an AAV vector.

[0627] In some aspects, the adenoviral vector is a third generation adenoviral vector. ADEASY™ is by far the most popular method for creating adenoviral vector constructs. The system consists of two types of plasmids: shuttle (or transfer) vectors and adenoviral vectors. The transgene of interest is cloned into the shuttle vector, verified, and linearized with the restriction enzyme PmeI. This construct is then transformed into ADEASIER-1 cells, which are BJ5183 E. coli cells containing PADEASY™. PADEASY™ is a ˜33 Kb adenoviral plasmid containing the adenoviral genes necessary for virus production. The shuttle vector and the adenoviral plasmid have matching left and right homology arms which facilitate homologous recombination of the transgene into the adenoviral plasmid. One can also co-transform standard BJ5183 with supercoiled PADEASY™ and the shuttle vector, but this method results in a higher background of non-recombinant adenoviral plasmids. Recombinant adenoviral plasmids are then verified for size and proper restriction digest patterns to determine that the transgene has been inserted into the adenoviral plasmid, and that other patterns of recombination have not occurred. Once verified, the recombinant plasmid is linearized with PacI to create a linear dsDNA construct flanked by ITRs. 293 or 911 cells are transfected with the linearized construct, and virus can be harvested about 7-10 days later. In addition to this method, other methods for creating adenoviral vector constructs known in the art at the time the present application was filed can be used to practice the methods disclosed herein.

[0628] In other aspects, the viral vector is a retroviral vector, e.g., a lentiviral vector (e.g., a third or fourth generation lentiviral vector). The term “lentivirus” refers to a genus of the Retroviridae family. Lentiviruses are unique among the retroviruses in being able to infect non-dividing cells; they can deliver a significant amount of genetic information into the DNA of the host cell, so they are one of the most efficient methods of a gene delivery vector. HIV, SIV, and FIV are all examples of lentiviruses. The term “lentiviral vector” refers to a vector derived from at least a portion of a lentivirus genome, including especially a self-inactivating lentiviral vector as provided in Milone et al., Mol. Ther. 17(8): 1453-1464 (2009). Other examples of lentivirus vectors that may be used in the clinic, include but are not limited to, e.g., the LENTIVECTOR® gene delivery technology from Oxford BioMedica, the LENTIMAX™ vector system from Lentigen and the like. Nonclinical types of lentiviral vectors are also available and would be known to one skilled in the art.

[0629] Lentiviral vectors are usually created in a transient transfection system in which a cell line is transfected with three separate plasmid expression systems. These include the transfer vector plasmid (portions of the HIV provirus), the packaging plasmid or construct, and a plasmid with the heterologous envelop gene (env) of a different virus. The three plasmid components of the vector are put into a packaging cell which is then inserted into the HIV shell. The virus portions of the vector contain insert sequences so that the virus cannot replicate inside the cell system. Current third generation lentiviral vectors encode only three of the nine HIV-1 proteins (Gag, Pol, Rev), which are expressed from separate plasmids to avoid recombination-mediated generation of a replication-competent virus. In fourth generation lentiviral vectors, the retroviral genome has been further reduced (see, e.g., TAKARA® LENTI-X™ fourth-generation packaging systems).

[0630] In some aspects, the present disclosure provides a lentiviral vector comprising a polynucleotide sequence encoding: (i) R12 scFv comprising SEQ ID NO: 4875; (ii) Spacer 1 comprising or consisting of SEQ ID NO: 4830, and optionally a Gly-Ser linker of SEQ ID NO:4818 or 5088; (iii) a transmembrane domain comprising SEQ ID NO: 4868 and optionally (iv) a 4-1BB costimulatory domain comprising SEQ ID NO: 4869. In some aspects, the lentiviral vector further comprises a polynucleotide sequence encoding (v) CD3z comprising SEQ ID NO: 4870; (vi) P2A comprising SEQ ID NO: 4871; (vii) EGFRt comprising SEQ ID NO: 4872, or any combination thereof.

[0631] In some aspects, the present disclosure provides a lentiviral vector comprising a polynucleotide sequence encoding: (i) R12 scFv comprising SEQ ID NO: 4875; (ii) Spacer 11 comprising or consisting of SEQ ID NO: 4840, and optionally a Gly-Ser linker of SEQ ID NO:4818 or 5088; (iii) a transmembrane domain comprising SEQ ID NO: 4868 and optionally (iv) a 4-1BB costimulatory domain comprising SEQ ID NO: 4869. In some aspects, the lentiviral vector further comprises a polynucleotide sequence encoding (v) CD3z comprising SEQ ID NO: 4870; (vi) P2A comprising SEQ ID NO: 4871; (vii) EGFRt comprising SEQ ID NO: 4872, or any combination thereof.

[0632] In some aspects, the present disclosure provides a lentiviral vector comprising a polynucleotide sequence encoding: (i) R12 scFv comprising SEQ ID NO: 4875; (ii) Spacer 13 comprising or consisting of SEQ ID NO: 4841, and optionally a Gly-Ser linker of SEQ ID NO:4818 or 5088; (iii) a transmembrane domain comprising SEQ ID NO: 4868 and optionally (iv) a 4-1BB costimulatory domain comprising SEQ ID NO: 4869. In some aspects, the lentiviral vector further comprises a polynucleotide sequence encoding (v) CD3z comprising SEQ ID NO: 4870; (vi) P2A comprising SEQ ID NO: 4871; (vii) EGFRt comprising SEQ ID NO: 4872, or any combination thereof.

[0633] In some aspects, the present disclosure provides a lentiviral vector comprising a polynucleotide sequence encoding: (i) R12 scFv comprising SEQ ID NO: 4875; (ii) Spacer 14 comprising or consisting of SEQ ID NO:4842, and optionally a Gly-Ser linker of SEQ ID NO:4818 or 5088; (iii) a transmembrane domain comprising SEQ ID NO: 4868 and optionally (iv) a 4-1BB costimulatory domain comprising SEQ ID NO: 4869. In some aspects, the lentiviral vector further comprises a polynucleotide sequence encoding (v) CD3z comprising SEQ ID NO: 4870; (vi) P2A comprising SEQ ID NO: 4871; (vii) EGFRt comprising SEQ ID NO: 4872, or any combination thereof.

[0634] In some aspects, the present disclosure provides a lentiviral vector comprising a polynucleotide sequence encoding: (i) R12 scFv comprising SEQ ID NO: 4875; (ii) a Gly-Ser linker of SEQ ID NO:4818 or 5088, (iii) Spacer 1 comprising or consisting of SEQ ID NO:4830, (iv) a transmembrane domain comprising SEQ ID NO: 4868 and optionally (v) a 4-1BB costimulatory domain comprising SEQ ID NO: 4869. In some aspects, the lentiviral vector further comprises a polynucleotide sequence encoding (vi) CD3z comprising SEQ ID NO: 4870; (vii) P2A comprising SEQ ID NO: 4871; (viii) EGFRt comprising SEQ ID NO: 4872, or any combination thereof.

[0635] In some aspects, the present disclosure provides a lentiviral vector comprising a polynucleotide sequence encoding: (i) R12 scFv comprising SEQ ID NO: 4875; (ii) a Gly-Ser linker of SEQ ID NO:4818 or 5088, (iii) Spacer 15 comprising or consisting of SEQ ID NO:4843, (iv) a transmembrane domain comprising SEQ ID NO: 4868 and optionally (v) a 4-1BB costimulatory domain comprising SEQ ID NO: 4869. In some aspects, the lentiviral vector further comprises a polynucleotide sequence encoding (vi) CD3z comprising SEQ ID NO: 4870; (vii) P2A comprising SEQ ID NO: 4871; (viii) EGFRt comprising SEQ ID NO: 4872, or any combination thereof.

[0636] In some aspects, the present disclosure provides a lentiviral vector comprising a polynucleotide sequence encoding: (i) R12 scFv comprising SEQ ID NO: 4875; (ii) a Gly-Ser linker of SEQ ID NO:4818 or 5088, (iii) Spacer 21 comprising or consisting of SEQ ID NO:4849, (iv) a transmembrane domain comprising SEQ ID NO: 4868 and optionally (v) a 4-1BB costimulatory domain comprising SEQ ID NO: 4869. In some aspects, the lentiviral vector further comprises a polynucleotide sequence encoding (vi) CD3z comprising SEQ ID NO: 4870; (vii) P2A comprising SEQ ID NO: 4871; (viii) EGFRt comprising SEQ ID NO: 4872, or any combination thereof.

[0637] In some aspects, the present disclosure provides a lentiviral vector comprising a polynucleotide sequence encoding: (i) R11 scFv comprising SEQ ID NO: 5048; (ii) a Gly-Ser linker of SEQ ID NO:4818 or 5088, (iii) Spacer 4 comprising or consisting of SEQ ID NO:4833, (iv) a transmembrane domain comprising SEQ ID NO: 4868 and optionally (v) a 4-1BB costimulatory domain comprising SEQ ID NO: 4869. In some aspects, the lentiviral vector further comprises a polynucleotide sequence encoding (vi) CD3z comprising SEQ ID NO: 4870; (vii) P2A comprising SEQ ID NO: 4871; (viii) EGFRt comprising SEQ ID NO: 4872, or any combination thereof.

[0638] In some aspects, the present disclosure provides a lentiviral vector comprising a polynucleotide sequence encoding: (i) R11 scFv comprising SEQ ID NO: 5048; (ii) a Gly-Ser linker of SEQ ID NO:4818 or 5088, (iii) Spacer 5 comprising or consisting of SEQ ID NO:4834, (iv) a transmembrane domain comprising SEQ ID NO: 4868 and optionally (v) a 4-1BB costimulatory domain comprising SEQ ID NO: 4869. In some aspects, the lentiviral vector further comprises a polynucleotide sequence encoding (vi) CD3z comprising SEQ ID NO: 4870; (vii) P2A comprising SEQ ID NO: 4871; (viii) EGFRt comprising SEQ ID NO: 4872, or any combination thereof.

[0639] In some aspects, the present disclosure provides a lentiviral vector comprising a polynucleotide sequence encoding: (i) R11 scFv comprising SEQ ID NO: 5048; (ii) a Gly-Ser linker of SEQ ID NO:4818 or 5088, (iii) Spacer 6 comprising or consisting of SEQ ID NO:4835, (iv) a transmembrane domain comprising SEQ ID NO: 4868 and optionally (v) a 4-1BB costimulatory domain comprising SEQ ID NO: 4869. In some aspects, the lentiviral vector further comprises a polynucleotide sequence encoding (vi) CD3z comprising SEQ ID NO: 4870; (vii) P2A comprising SEQ ID NO: 4871; (viii) EGFRt comprising SEQ ID NO: 4872, or any combination thereof.

[0640] In some aspects, the present disclosure provides a lentiviral vector comprising a polynucleotide sequence encoding: (i) 2A2 scFv comprising SEQ ID NO: 5047; (ii) a Gly-Ser linker of SEQ ID NO:4818 or 5088, (iii) Spacer 13 comprising or consisting of SEQ ID NO:4841, (iv) a transmembrane domain comprising SEQ ID NO: 4868 and optionally (v) a 4-1BB costimulatory domain comprising SEQ ID NO: 4869. In some aspects, the lentiviral vector further comprises a polynucleotide sequence encoding (vi) CD3z comprising SEQ ID NO: 4870; (vii) P2A comprising SEQ ID NO: 4871; (viii) EGFRt comprising SEQ ID NO: 4872, or any combination thereof.

[0641] In some aspects, the present disclosure provides a lentiviral vector comprising a polynucleotide sequence encoding: (i) 2A2 scFv comprising SEQ ID NO: 5047; (ii) a Gly-Ser linker of SEQ ID NO:4818 or 5088, (iii) Spacer 21 comprising or consisting of SEQ ID NO:4889, (iv) a transmembrane domain comprising SEQ ID NO: 4868 and optionally (v) a 4-1BB costimulatory domain comprising SEQ ID NO: 4869. In some aspects, the lentiviral vector further comprises a polynucleotide sequence encoding (vi) CD3z comprising SEQ ID NO: 4870; (vii) P2A comprising SEQ ID NO: 4871; (viii) EGFRt comprising SEQ ID NO: 4872, or any combination thereof.

[0642] In some aspects, the present disclosure provides a lentiviral vector comprising a polynucleotide sequence encoding: (i) R2A2 scFv comprising SEQ ID NO: 5047; (ii) a Gly-Ser linker of SEQ ID NO:4818 or 5088, (iii) Spacer 28 comprising or consisting of SEQ ID NO:4856, (iv) a transmembrane domain comprising SEQ ID NO: 4868 and optionally (v) a 4-1BB costimulatory domain comprising SEQ ID NO: 4869. In some aspects, the lentiviral vector further comprises a polynucleotide sequence encoding (vi) CD3z comprising SEQ ID NO: 4870; (vii) P2A comprising SEQ ID NO: 4871; (viii) EGFRt comprising SEQ ID NO: 4872, or any combination thereof.

[0643] In some aspects, the present disclosure provides a lentiviral vector comprising a polynucleotide sequence encoding: (i) R12 scFv comprising SEQ ID NO: 4875; (ii) a Gly-Ser linker of SEQ ID NO:4818 or 5088, (iii) a spacer derived from a human immunoglobulin hinge and/or constant region or a functional fragment thereof, (iv) a transmembrane domain comprising SEQ ID NO: 4868 and optionally (v) a 4-1BB costimulatory domain comprising SEQ ID NO: 4869, wherein the combined length of the linker (ii) and spacer (iii) is between 35 Å and 55 Å. In some aspects, the lentiviral vector further comprises a polynucleotide sequence encoding (vi) CD3z comprising SEQ ID NO: 4870; (vii) P2A comprising SEQ ID NO: 4871; (viii) EGFRt comprising SEQ ID NO: 4872, or any combination thereof.

[0644] In some aspects, the present disclosure provides a lentiviral vector comprising a polynucleotide sequence encoding: (i) R12 scFv comprising SEQ ID NO: 4875; (ii) a Gly-Ser linker of SEQ ID NO:4818 or 5088, (iii) a spacer derived from a human immunoglobulin hinge and/or constant region or a functional fragment thereof, (iv) a transmembrane domain comprising SEQ ID NO: 4868 and optionally (v) a 4-1BB costimulatory domain comprising SEQ ID NO: 4869, wherein the combined length of the linker (ii) and spacer (iii) is about 45 Å. In some aspects, the lentiviral vector further comprises a polynucleotide sequence encoding (vi) CD3z comprising SEQ ID NO: 4870; (vii) P2A comprising SEQ ID NO: 4871; (viii) EGFRt comprising SEQ ID NO: 4872, or any combination thereof.

[0645] In some aspects, the present disclosure provides a lentiviral vector comprising a polynucleotide sequence encoding: (i) R11 scFv comprising SEQ ID NO: 5048; (ii) a Gly-Ser linker of SEQ ID NO:4818 or 5088, (iii) a spacer derived from a human immunoglobulin hinge and/or constant region or a functional fragment thereof, (iv) a transmembrane domain comprising SEQ ID NO: 4868 and optionally (v) a 4-1BB costimulatory domain comprising SEQ ID NO: 4869, wherein the combined length of the linker (ii) and spacer (iii) is between 180 Å and 250 Å. In some aspects, the lentiviral vector further comprises a polynucleotide sequence encoding (vi) CD3z comprising SEQ ID NO: 4870; (vii) P2A comprising SEQ ID NO: 4871; (viii) EGFRt comprising SEQ ID NO: 4872, or any combination thereof.

[0646] In some aspects, the present disclosure provides a lentiviral vector comprising a polynucleotide sequence encoding: (i) R11 scFv comprising SEQ ID NO: 5048; (ii) a Gly-Ser linker of SEQ ID NO:4818 or 5088, (iii) a spacer derived from a human immunoglobulin hinge and/or constant region or a functional fragment thereof, (iv) a transmembrane domain comprising SEQ ID

[0647] NO: 4868 and optionally (v) a 4-1BB costimulatory domain comprising SEQ ID NO: 4869, wherein the combined length of the linker (ii) and spacer (iii) is about 200 Å. In some aspects, the lentiviral vector further comprises a polynucleotide sequence encoding (vi) CD3z comprising SEQ ID NO: 4870; (vii) P2A comprising SEQ ID NO: 4871; (viii) EGFRt comprising SEQ ID NO: 4872, or any combination thereof.

[0648] In some aspects, the present disclosure provides a lentiviral vector comprising a polynucleotide sequence encoding: (i) 2A2 scFv comprising SEQ ID NO: 5047; (ii) a Gly-Ser linker of SEQ ID NO:4818 or 5088, (iii) a spacer derived from a human immunoglobulin hinge and/or constant region or a functional fragment thereof, (iv) a transmembrane domain comprising SEQ ID NO: 4868 and optionally (v) a 4-1BB costimulatory domain comprising SEQ ID NO: 4869, wherein the combined length of the linker (ii) and spacer (iii) is between 35 Å and 55 Å. In some aspects, the lentiviral vector further comprises a polynucleotide sequence encoding (vi) CD3z comprising SEQ ID NO: 4870; (vii) P2A comprising SEQ ID NO: 4871; (viii) EGFRt comprising SEQ ID NO: 4872, or any combination thereof.

[0649] In some aspects, the present disclosure provides a lentiviral vector comprising a polynucleotide sequence encoding: (i) 2A2 scFv comprising SEQ ID NO: 5047; (ii) a Gly-Ser linker of SEQ ID NO:4818 or 5088, (iii) a spacer derived from a human immunoglobulin hinge and/or constant region or a functional fragment thereof, (iv) a transmembrane domain comprising SEQ ID NO: 4868 and optionally (v) a 4-1BB costimulatory domain comprising SEQ ID NO: 4869, wherein the combined length of the linker (ii) and spacer (iii) is about 45 Å. In some aspects, the lentiviral vector further comprises a polynucleotide sequence encoding (vi) CD3z comprising SEQ ID NO: 4870; (vii) P2A comprising SEQ ID NO: 4871; (viii) EGFRt comprising SEQ ID NO: 4872, or any combination thereof.

[0650] In some aspects, the present disclosure provides a lentiviral vector comprising a polynucleotide sequence encoding a CAR comprising, consisting, or consisting essentially of a sequence set forth in SEQ ID NOS: 5049 to 5063.In some aspects, the present disclosure provides a lentiviral vector comprising a polynucleotide sequence encoding: (i) FMC63 scFv comprising SEQ ID NO: 4866; (ii) Spacer 7 comprising or consisting of SEQ ID NO: 4836, and optionally a Gly-Ser linker of SEQ ID NO:4818 or 5088; (iii) a transmembrane domain comprising SEQ ID NO: 4877 and optionally (iv) a 4-1BB costimulatory domain comprising SEQ ID NO: 4878. In some aspects, the lentiviral vector further comprises a polynucleotide sequence encoding (v) CD3z comprising SEQ ID NO: 4879; (vi) P2A comprising SEQ ID NO: 4880; (vii) EGFRt comprising SEQ ID NO: 4881, or any combination thereof.

[0651] In some aspects, the present disclosure provides a lentiviral vector comprising a polynucleotide sequence encoding: (i) FMC63 scFv comprising SEQ ID NO: 4866; (ii) Spacer 8 comprising or consisting of SEQ ID NO: 4837, and optionally a Gly-Ser linker of SEQ ID NO:4818 or 5088; (iii) a transmembrane domain comprising SEQ ID NO: 4877 and optionally (iv) a 4-1BB costimulatory domain comprising SEQ ID NO: 4878. In some aspects, the lentiviral vector further comprises a polynucleotide sequence encoding (v) CD3z comprising SEQ ID NO: 4879; (vi) P2A comprising SEQ ID NO: 4880; (vii) EGFRt comprising SEQ ID NO: 4881, or any combination thereof.

[0652] In some aspects, the present disclosure provides a lentiviral vector comprising a polynucleotide sequence encoding: (i) FMC63 scFv comprising SEQ ID NO: 4866; (ii) Spacer 9 comprising or consisting of SEQ ID NO: 4838, and optionally a Gly-Ser linker of SEQ ID NO:4818 or 5088; (iii) a transmembrane domain comprising SEQ ID NO: 4877 and optionally (iv) a 4-1BB costimulatory domain comprising SEQ ID NO: 4878. In some aspects, the lentiviral vector further comprises a polynucleotide sequence encoding (v) CD3z comprising SEQ ID NO: 4879; (vi) P2A comprising SEQ ID NO: 4880; (vii) EGFRt comprising SEQ ID NO: 4881, or any combination thereof.

[0653] In some aspects, the present disclosure provides a lentiviral vector comprising a polynucleotide sequence encoding: (i) FMC63 scFv comprising SEQ ID NO: 4866; (ii) Spacer 10 comprising or consisting of SEQ ID NO: 4939, and optionally a Gly-Ser linker of SEQ ID NO:4818 or 5088; (iii) a transmembrane domain comprising SEQ ID NO: 4877 and optionally (iv) a 4-1BB costimulatory domain comprising SEQ ID NO: 4878. In some aspects, the lentiviral vector further comprises a polynucleotide sequence encoding (v) CD3z comprising SEQ ID NO: 4879; (vi) P2A comprising SEQ ID NO: 4880; (vii) EGFRt comprising SEQ ID NO: 4881, or any combination thereof.

[0654] In some aspects, the present disclosure provides a lentiviral vector comprising a polynucleotide sequence encoding: (i) FMC63 scFv comprising SEQ ID NO: 4866; (ii) Spacer 11 comprising or consisting of SEQ ID NO: 4840, and optionally a Gly-Ser linker of SEQ ID NO:4818 or 5088; (iii) a transmembrane domain comprising SEQ ID NO: 4877 and optionally (iv) a 4-1BB costimulatory domain comprising SEQ ID NO: 4878. In some aspects, the lentiviral vector further comprises a polynucleotide sequence encoding (v) CD3z comprising SEQ ID NO: 4879; (vi) P2A comprising SEQ ID NO: 4880; (vii) EGFRt comprising SEQ ID NO: 4881, or any combination thereof.

[0655] In some aspects, the present disclosure provides a lentiviral vector comprising a polynucleotide sequence encoding: (i) FMC63 scFv comprising SEQ ID NO: 4866; (ii) Spacer 14 comprising or consisting of SEQ ID NO: 4842, and optionally a Gly-Ser linker of SEQ ID NO:4818 or 5088; (iii) a transmembrane domain comprising SEQ ID NO: 4877 and optionally (iv) a 4-1BB costimulatory domain comprising SEQ ID NO: 4878. In some aspects, the lentiviral vector further comprises a polynucleotide sequence encoding (v) CD3z comprising SEQ ID NO: 4879; (vi) P2A comprising SEQ ID NO: 4880; (vii) EGFRt comprising SEQ ID NO: 4881, or any combination thereof.

[0656] In some aspects, the present disclosure provides a lentiviral vector comprising a polynucleotide sequence encoding: (i) FMC63 scFv comprising SEQ ID NO: 4866; (ii) Spacer 16 comprising or consisting of SEQ ID NO: 4844, and optionally a Gly-Ser linker of SEQ ID NO:4818 or 5088; (iii) a transmembrane domain comprising SEQ ID NO: 4877 and optionally (iv) a 4-1BB costimulatory domain comprising SEQ ID NO: 4878. In some aspects, the lentiviral vector further comprises a polynucleotide sequence encoding (v) CD3z comprising SEQ ID NO: 4879; (vi) P2A comprising SEQ ID NO: 4880; (vii) EGFRt comprising SEQ ID NO: 4881, or any combination thereof.

[0657] In some aspects, the present disclosure provides a lentiviral vector comprising a polynucleotide sequence encoding: (i) FMC63 scFv comprising SEQ ID NO: 4866; (ii) Spacer 28 comprising or consisting of SEQ ID NO: 4856, and optionally a Gly-Ser linker of SEQ ID NO:4818 or 5088; (iii) a transmembrane domain comprising SEQ ID NO: 4877 and optionally (iv) a 4-1BB costimulatory domain comprising SEQ ID NO: 4878. In some aspects, the lentiviral vector further comprises a polynucleotide sequence encoding (v) CD3z comprising SEQ ID NO: 4879; (vi) P2A comprising SEQ ID NO: 4880; (vii) EGFRt comprising SEQ ID NO: 4881, or any combination thereof.

[0658] In some aspects, the present disclosure provides a lentiviral vector comprising a polynucleotide sequence encoding: (i) FMC63 scFv comprising SEQ ID NO: 4866; (ii) Spacer 28 comprising or consisting of SEQ ID NO: 4856, and optionally a Gly-Ser linker of SEQ ID NO:4818 or 5088; (iii) a transmembrane domain comprising SEQ ID NO: 4877 and optionally (iv) a 4-1BB costimulatory domain comprising SEQ ID NO: 4878. In some aspects, the lentiviral vector further comprises a polynucleotide sequence encoding (v) CD3z comprising SEQ ID NO: 4879; (vi) P2A comprising SEQ ID NO: 4880; (vii) EGFRt comprising SEQ ID NO: 4881, or any combination thereof.

[0659] In some aspects, non-viral methods can be used to deliver a nucleic acid comprising a polynucleotide encoding a CAR of the present disclosure into a cell or tissue of a subject. In some aspects, the non-viral method includes the use of a transposon. In some aspects, use of a non-viral method of delivery permits reprogramming of cells, e.g., T or NK cells, and direct infusion of the cells into the subject. In some aspects, a nucleic acid sequence comprising a polynucleotide encoding a CAR of the present disclosure can be inserted into the genome of a target cell (e.g., a T cell) or a host cell (e.g., a cell for recombinant expression of the CAR polypeptide) by using CRISPR/Cas systems and genome edition alternatives such as zinc-finger nucleases (ZFNs), transcription activator-like effector nucleases (TALENs), and meganucleases (MNs).

[0660] In some, a CAR of the present disclosure (i.e., CAR comprising a CAR spacer of the present disclosure, i.e., a hinge derived CAR spacer, a loop derived CAR spacer, or a combination thereof) can be expressed in a cell using bicistronic or multicistronic expression vectors. In some aspects, bicistronic or multicistronic vectors include, but not limited to, (1) multiple promoters fused to multiple CARs' open reading frames; (2) insertion of splicing signals between units of a CAR; fusion of CARs of which expressions are driven by a single promoter; (3) insertion of proteolytic cleavage sites between units of CAR (self-cleavage peptide); and (iv) insertion of internal ribosomal entry sites (IRESs).

[0661] In some aspects, multiple CAR units are expressed in a single open reading frame (ORF), thereby creating a single polypeptide having multiple CAR units, wherein at least one of the CARs is a CAR of the present disclosure. In some aspects, an amino acid sequence or linker containing a high efficiency cleavage site is disposed between each CAR unit. As used herein, high cleavage efficiency is defined as more than 50%, more than 70%, more than 80%, or more than 90% of the translated protein is cleaved. Cleavage efficiency can be measured by Western Blot analysis.

[0662] Non-limiting examples of high efficiency cleavage sites include porcine teschovirus-1 2A (P2A), FMDV 2A (abbreviated herein as F2A); equine rhinitis A virus (ERAV) 2A (E2A); and Thoseaasigna virus 2A (T2A), cytoplasmic polyhedrosis virus 2A (BmCPV2A) and flacherie Virus 2A (BmIFV2A), or a combination thereof. In some aspects, the high efficiency cleavage site is P2A. High efficiency cleavage sites are described in Kim et al. (2011) High Cleavage Efficiency of a 2A Peptide Derived from Porcine Teschovirus-1 in Human Cell Lines, Zebrafish and Mice. PLoS ONE 6(4): e18556, the contents of which are incorporated herein by reference.

[0663] In some aspects, multiple CAR units are expressed in a single open reading frame (ORF), expression is under the control of a strong promoter.

[0664] In some aspects, the vector of the present disclosure further comprises an accessory gene. In some aspects, the accessory gene is a non-immunogenic selection tool, a tracking marker, or a suicide gene. In some aspects, the accessory gene is a truncated EGFR gene (EGFRt). An example of a truncated EGFR (EGFRt) gene that can be used in accordance with the embodiments described herein comprises SEQ ID NO: 4872 (includes the GMCSF signal peptide set forth in SEQ ID NO:4865) or SEQ ID NO:5064 (without signal peptide).

### Polynucleotide Modifications

[0665] In some aspects, a polynucleotide encoding a CAR of the present disclosure (i.e., CAR comprising a CAR spacer of the present disclosure, i.e., a hinge derived CAR spacer, a loop derived CAR spacer, or a combination thereof) can comprise at least one chemically modified nucleobase, sugar, backbone, or any combination thereof. Thus, a polynucleotide encoding a CAR of the present disclosure can comprise one or more modifications. In some aspects, a polynucleotide encoding a CAR of the present disclosure comprises at least one nucleotide analogue. In some aspects, at least one nucleotide analogue introduced by using IVT (in vitro transcription) or chemical synthesis is selected from the group consisting of a 2′-O-methoxyethyl-RNA (2′-MOE-RNA) monomer, a 2′-fluoro-DNA monomer, a 2′-O-alkyl-RNA monomer, a 2′-amino-DNA monomer, a locked nucleic acid (LNA) monomer, a cEt monomer, a cMOE monomer, a 5′-Me-LNA monomer, a 2′-(3-hydroxy)propyl-RNA monomer, an arabino nucleic acid (ANA) monomer, a 2′-fluoro-ANA monomer, an anhydrohexitol nucleic acid (HNA) monomer, an intercalating nucleic acid (INA) monomer, and a combination of two or more of said nucleotide analogues. In some aspects, the optimized nucleic acid molecule comprises at least one backbone modification, for example, a phosphorothioate internucleotide linkage.

[0666] In some aspects, a polynucleotide encoding a CAR of the present disclosure can be chemically modified at terminal locations, for example by introducing M (2′-O-methyl), MS (2′-O-methyl 3′ phosphorothioate), or MSP (2′-O-methyl 3′thioPACE, phosphonoacetate) modifications, or combinations thereof at positions 1, 2, 3 respect to the 5′ and/or 3′ termini.

[0667] Modified polynucleotides encoding a CAR of the present disclosure (i.e., CAR comprising a CAR spacer of the present disclosure, i.e., a hinge derived CAR spacer, a loop derived CAR spacer, or a combination thereof) need not be uniformly modified along the entire length of the molecule. Different nucleotide modifications and/or backbone structures may exist at various positions in the nucleic acid. One of ordinary skill in the art will appreciate that the nucleotide analogs or other modification(s) may be located at any position(s) of a nucleic acid such that the function of the nucleic acid is not substantially decreased. A modification may also be a 5′ or 3′ terminal modification. The nucleic acids may contain at a minimum one and at maximum 100% modified nucleotides, or any intervening percentage, such as at least about 20%, at least about 25%, at least about 30%, at least about 35%, at least about 40%, at least about 45%, at least about 50%, at least about 55%, at least about 60%, at least about 65%, at least about 70%, at least about 75%, at least about 80%, at least about 85%, at least about 90%, at least about 95%, or at least about 99% modified nucleotides.

[0668] In some aspects, a polynucleotide encoding a CAR of the present disclosure (i.e., CAR comprising a CAR spacer of the present disclosure, i.e., a hinge derived CAR spacer, a loop derived CAR spacer, or a combination thereof) can include modifications to prevent rapid degradation by endo- and exo-nucleases. Modifications include, but are not limited to, for example, (a) end modifications, e.g., 5′ end modifications (phosphorylation dephosphorylation, conjugation, inverted linkages, etc.), 3′ end modifications (conjugation, DNA nucleotides, inverted linkages, etc.), (b) base modifications, e.g., replacement with modified bases, stabilizing bases, destabilizing bases, or bases that base pair with an expanded repertoire of partners, or conjugated bases, (c) sugar modifications (e.g., at the 2′ position or 4′ position) or replacement of the sugar, as well as (d) internucleoside linkage modifications, including modification or replacement of the phosphodiester linkages.

[0669] Specific examples of synthetic, modified polynucleotides encoding a CAR of the present disclosure (i.e., CAR comprising a CAR spacer of the present disclosure, i.e., a hinge derived CAR spacer, a loop derived CAR spacer, or a combination thereof) useful with the methods described herein include, but are not limited to, polynucleotides encoding a CAR of the present disclosure containing modified or non-natural internucleoside linkages. Synthetic, modified polynucleotides encoding a CAR of the present disclosure having modified internucleoside linkages include, among others, those that do not have a phosphorus atom in the internucleoside linkage. In some aspects, a synthetic, modified polynucleotide encoding a CAR of the present disclosure has a phosphorus atom in its internucleoside linkage(s).

[0670] Non-limiting examples of modified internucleoside linkages include phosphorothioates, chiral phosphorothioates, phosphorodithioates, phosphotriesters, aminoalkylphosphotriesters, methyl and other alkyl phosphonates including 3′-alkylene phosphonates and chiral phosphonates, phosphinates, phosphoramidates including 3′-amino phosphoramidate and aminoalkylphosphoramidates, thionophosphoramidates, thionoalkylphosphonates, thionoalkylphosphotriesters, and boranophosphates having normal 3′-5′ linkages, T-5′ linked analogs of these, and those) having inverted polarity wherein the adjacent pairs of nucleoside units are linked 3′-5′ to 5′-3′ or T-5′ to 5′-T. Various salts, mixed salts and free acid forms are also included.

[0671] Modified internucleoside linkages that do not include a phosphorus atom therein have internucleoside linkages that are formed by short chain alkyl or cycloalkyl internucleoside linkages, mixed heteroatoms and alkyl or cycloalkyl internucleoside linkages, or one or more short chain heteroatomic or heterocyclic internucleoside linkages. These include those having morpholino linkages (formed in part from the sugar portion of a nucleoside); siloxane backbones; sulfide, sulfoxide and sulfone backbones; formacetyl and thioformacetyl backbones; methylene formacetyl and thioformacetyl backbones; alkene containing backbones; sulfamate backbones; methyleneimino and methylenehydrazino backbones; sulfonate and sulfonamide backbones; amide backbones; and others having mixed N, O, S and CH₂ component parts.

[0672] In some aspects, a polynucleotide encoding a CAR of the present disclosure (i.e., CAR comprising a CAR spacer of the present disclosure, i.e., a hinge derived CAR spacer, a loop derived CAR spacer, or a combination thereof) can be codon optimized by introducing one or more synonymous codon changes. As used herein, the terms “codon optimization,” “codon optimized,” and grammatical variants thereof refer to the modification of the primary sequence of a nucleic acid by replacing synonymous codons in order to increase its translational efficiency. Accordingly, codon optimization comprises switching the codons used in a polynucleotide encoding a CAR of the present disclosure without changing the amino acid sequence that it encodes for, which typically dramatically increases the abundance of the protein the codon optimized gene encodes because it generally removes “rare” codons and replaces them with abundant codons, or removes codon with a low tRNA recharge rate with codon with high tRNA recharge rates. Such codon optimization can, for example, (i) improve protein yield in recombinant protein expression, or (ii) improve the stability, half life, or other desirable property of an mRNA or a DNA encoding a binding molecule disclosed herein, wherein such mRNA or DNA is administered to a subject in need thereof.

[0673] The sequences of polynucleotides encoding a CAR of the present disclosure (i.e., CAR comprising a CAR spacer of the present disclosure, i.e., a hinge derived CAR spacer, a loop derived CAR spacer, or a combination thereof) can be codon optimized using any methods known in the art at the time the present application was filed.

[0674] In some aspects, a polynucleotide encoding a CAR of the present disclosure (i.e., CAR comprising a CAR spacer of the present disclosure, i.e., a hinge derived CAR spacer, a loop derived CAR spacer, or a combination thereof) has been sequence optimized. As used herein, the term “sequence optimized” refers to the modification of the sequence of a nucleic acid by to introduce features that increase its translational efficiency, remove features that reduce its translational efficiency, or in general improve properties related to expression efficacy after administration in vivo. Such properties include, but are not limited to, improving nucleic acid stability (e.g., mRNA stability), increasing translation efficacy in the target tissue, reducing the number of truncated proteins expressed, improving the folding or prevent misfolding of the expressed proteins, reducing toxicity of the expressed products, reducing cell death caused by the expressed products, or increasing and/or decreasing protein aggregation

[0675] The present disclosure contemplates modifications to the entire CAR construct e.g., modifications in one or more amino acid sequences of the various domains of the CAR construct in order to generate functionally equivalent molecules. The CAR construct can be modified to retain at least about 70%, 71%, 72%, 73%, 74%, 75%, 76%, 77%, 78%, 79%, 80%, 81%, 82%, 83%, 84%, 85%, 86%, 87%, 88%, 89%, 90%, 91%, 92%, 93%, 94%, 95%, 96%, 97%, 98%, 99% sequence identity of the starting CAR construct. The present disclosure also contemplates modifications of specific regions of a CAR, e.g., modifications in one or more amino acid sequences of one or more CDRs of a CAR construct in order to generate functionally equivalent molecules.

### Cells

[0676] The present disclosure also provides a genetically modified cell comprising a polynucleotide encoding a CAR of the present disclosure (i.e., CAR comprising a CAR spacer of the present disclosure, i.e., a hinge derived CAR spacer, a loop derived CAR spacer, or a combination thereof). In some aspects, the CAR is recombinantly expressed by a cell genetically modified to express a CAR, wherein the cell comprises by one or more of the polynucleotide sequences or the vectors encoding a CAR of the present disclosure.

[0677] In some aspects, the genetically modified cell disclosed herein has been transfected with a polynucleotide or vector encoding a CAR of the present disclosure. The term “transfected” (or equivalent terms “transformed” and “transduced”) refers to a process by which exogenous nucleic acid, e.g., a polynucleotide or vector encoding a CAR of the present disclosure, is transferred or introduced into the genome of the host cell, e.g., a T cell. A “transfected” cell is one which has been transfected, transformed or transduced with exogenous nucleic acid, e.g., a polynucleotide or vector encoding a CAR of the present disclosure. The cell includes the primary subject cell and its progeny.

[0678] In some aspects, the cell (e.g., T cell) is transfected with a vector of the present disclosure, e.g., an AAV vector or a lentiviral vector. In some such aspects, the cell may stably express the CAR of the present disclosure.

[0679] In some aspects, the cell (e.g., T cell) is transfected with a nucleic acid, e.g., mRNA, cDNA, DNA, encoding a CAR of the present disclosure. In some such aspects, the cell may transiently express the CAR of the present disclosure. For example, an RNA construct can be directly transfected into a cell. A method for generating mRNA for use in transfection involves in vitro transcription (IVT) of a template with specially designed primers, followed by polyA addition, to produce a construct containing 3′ and 5′ untranslated sequence (UTR), a 5′ cap and/or Internal Ribosome Entry Site (IRES), the nucleic acid to be expressed, and a polyA tail, typically 50-2000 bases in length. RNA so produced can efficiently transfect different kinds of cells. In some aspects, the template includes sequences for the CAR of the present disclosure. In an aspect, an RNA CAR vector is transduced into a T cell by electroporation.

[0680] In some aspects, the cell is an immune effector cell. As used herein, term “immune effector cell” refers to a cell that is involved in an immune response, e.g., in the promotion of an immune effector response. “Immune effector function” or “immune effector response,” refer to function or response, e.g., of an immune effector cell, that enhances or promotes an immune attack of a target cell. E.g., an immune effector function or response refers a property of a T or NK cell that promotes killing or the inhibition of growth or proliferation, of a target cell. In the case of a T cell, primary stimulation and co-stimulation are examples of immune effector function or response.

[0681] The term “effector function” refers to a specialized function of a cell. Effector function of a T cell, for example, may be cytolytic activity or helper activity including the secretion of cytokines. The intracellular signaling domain of a CAR can generate a signal that promotes an immune effector function of the CAR containing cell, e.g., a CART cell. Examples of immune effector function, e.g., in a CART cell, include cytolytic activity and helper activity, including the secretion of cytokines. In some aspects, the intracellular signal domain is the portion of the CAR which transduces the effector function signal and directs the cell to perform a specialized function. While the entire intracellular signaling domain can be employed, in many cases it is not necessary to use the entire chain. To the extent that a truncated portion of the intracellular signaling domain is used, such truncated portion may be used in place of the intact chain as long as it transduces the effector function signal. The term intracellular signaling domain is thus meant to include any truncated portion of the intracellular signaling domain sufficient to transduce the effector function signal.

[0682] In some aspects, the intracellular signaling domain can comprise a primary intracellular signaling domain. Exemplary primary intracellular signaling domains include those derived from the molecules responsible for primary stimulation, or antigen dependent simulation. In some aspects, the intracellular signaling domain can comprise a costimulatory intracellular domain. Exemplary costimulatory intracellular signaling domains include those derived from molecules responsible for costimulatory signals, or antigen independent stimulation. For example, in the case of a CART, a primary intracellular signaling domain can comprise a cytoplasmic sequence of a T cell receptor, and a costimulatory intracellular signaling domain can comprise cytoplasmic sequence from co-receptor or costimulatory molecule.

[0683] A primary intracellular signaling domain can comprise a signaling motif which is known as an immunoreceptor tyrosine-based activation motif or ITAM. Examples of ITAM containing primary cytoplasmic signaling sequences include, but are not limited to, those derived from CD3 zeta, FcR gamma, common FcR gamma (FCER1G), Fc gamma RIIa, FcR beta (Fc Epsilon Rib), CD3 gamma, CD3 delta, CD3 epsilon, CD22, CD79a, CD79b, CD278 (“ICOS”), FccRI, CD66d, CD32, DAP10 and DAP12.

[0684] Examples of immune effector cells include, e.g., T cells, e.g., alpha/beta T cells and gamma/delta T cells, B cells, natural killer (NK) cells, natural killer T (NKT) cells, mast cells, and myeloid-derived phagocytes. Innate lymphoid cells (ILCs) are a group of innate immune cells that are derived from common lymphoid progenitor (CLP) and belong to the lymphoid lineage. These cells are defined by absence of antigen specific B or T cell receptor because of the lack of recombination activating gene (RAG). ILCs do not express myeloid or dendritic cell markers. ILCs has varying physiological functions; some functions are analogous to helper T cells, while the group also includes cytotoxic NK cells. Accordingly, in some aspects, the cell genetically modified to express a CAR of the present disclosure is, e.g., a T cell, an NK cell, an NKT cell, or an ILC cell.

[0685] T cells can be obtained from a number of sources, including peripheral blood mononuclear cells, bone marrow, lymph node tissue, cord blood, thymus tissue, tissue from a site of infection, ascites, pleural effusion, spleen tissue, and tumors.

### Pharmaceutical Compositions

[0686] The present disclosure also provides pharmaceutical compositions comprising compositions disclosed herein, e.g., a polynucleotide encoding a CAR of the present disclosure, a vector comprising a polynucleotide encoding a CAR of the present disclosure, or a genetically modified cell comprising a polynucleotide or a vector encoding a CAR of the present disclosure, which are suitable for administration to a subject.

[0687] The pharmaceutical compositions generally comprise polynucleotide, vector, or cell encoding or comprising a CAR of the present disclosure and a pharmaceutically-acceptable excipient or carrier in a form suitable for administration to a subject. Pharmaceutically acceptable excipients or carriers are determined in part by the particular composition being administered, as well as by the particular method used to administer the composition.

[0688] There is a wide variety of suitable formulations of pharmaceutical compositions comprising a CAR of the present disclosure (see, e.g., Remington's Pharmaceutical Sciences, Mack Publishing Co., Easton, Pa. 18th ed. (1990)). The pharmaceutical compositions are generally formulated sterile and in full compliance with all Good Manufacturing Practice (GMP) regulations of the U.S. Food and Drug Administration.

[0689] In certain aspects, the pharmaceutical composition is co-administered with of one or more additional therapeutic agents, in a pharmaceutically acceptable carrier. In some aspects, the pharmaceutical composition comprising the CAR of the present disclosure is administered prior to administration of the additional therapeutic agent(s). In other aspects, the pharmaceutical composition comprising the CAR of the present disclosure is administered after the administration of the additional therapeutic agent(s). In further aspects, the pharmaceutical composition comprising the CAR of the present disclosure is administered concurrently with the additional therapeutic agent(s).

[0690] Acceptable carriers, excipients, or stabilizers are nontoxic to recipients (e.g., animals or humans) at the dosages and concentrations employed, and include buffers such as phosphate, citrate, and other organic acids; antioxidants including ascorbic acid and methionine; preservatives (such as octadecyldimethylbenzyl ammonium chloride; hexamethonium chloride; benzalkonium chloride, benzethonium chloride; phenol, butyl or benzyl alcohol; alkyl parabens such as methyl or propyl paraben; catechol; resorcinol; cyclohexanol; 3-pentanol; and m-cresol); low molecular weight (less than about 10 residues) polypeptides; proteins, such as serum albumin, gelatin, or immunoglobulins; hydrophilic polymers such as polyvinylpyrrolidone; amino acids such as glycine, glutamine, asparagine, histidine, arginine, or lysine; monosaccharides, disaccharides, and other carbohydrates including glucose, mannose, or dextrins; chelating agents such as EDTA; sugars such as sucrose, mannitol, trehalose or sorbitol; salt-forming counter-ions such as sodium; metal complexes (e.g., Zn-protein complexes); and/or non-ionic surfactants such as TWEEN™, PLURONICS™ or polyethylene glycol (PEG).

[0691] Examples of carriers or diluents include, but are not limited to, water, saline, Ringer's solutions, dextrose solution, and 5% human serum albumin. The use of such media and compounds for pharmaceutically active substances is well known in the art. Except insofar as any conventional media or compound is incompatible with the compositions of the present disclosure (e.g., polynucleotides, vectors, or cells), use thereof in the compositions is contemplated.

### VI. Libraries and Methods of Use

[0692] The present disclosure also provides libraries comprising Ig hinges, fragment thereof, and combinations thereof (e.g., two or more Ig hinge fragments concatenated). The libraries of the present disclosure can be screened to identify polypeptides with the optimal length and composition to be used as CAR spacer, i.e., spacer resulting in CAR with enhanced activity with respect to a corresponding CAR comprising a reference spacer (e.g., a spacer comprising an IgG1 hinge).

[0693] In some aspects, spacer libraries can be generated by concatenating fragments of immunoglobulin hinges disclosed here (see disclosures about modular spacers above). A schematic representation of a small library generated from IgG3 modules is provided in FIG. 8. In some aspects, a spacer library of the present disclosure comprises Spacer 1 to Spacer 31 disclosed in FIG. 9. In some aspects, a spacer library of the present disclosure comprises Spacer 1 to Spacer 31 disclosed in FIG. 9 and/or variants thereof, e.g., spacers corresponding to Spacer 1 to Spacer 31 further comprising a flexible linker, e.g., a flexible linker of SEQ ID NO: 4818 or 5088, linked to the N-terminus and/or C-terminus of the amino sequence of Spacer 1 to Spacer 31 as set forth in FIG. 9.

[0694] The present disclosure also provides CAR libraries comprising, e.g., variants of a CAR in which the spacer is replaced by a spacer from a spacer library of the present disclosure (e.g., a library comprising the spacers disclosed in FIG. 9 or variants thereof). Also provided are CAR libraries comprising, e.g., variants of a CAR comprising a spacer disclosed herein (e.g., a spacer disclosed in FIG. 9) in which other CAR components are substituted, e.g., signal peptide, binding (e.g., scFv), transmembrane domain, costimulatory domain, signaling domain, or any combination thereof.

### VII. Indications

[0695] In some aspects, the compositions disclosed herein (e.g., polynucleotides encoding CARs of the present disclosure, vectors comprising polynucleotides encoding CARs of the present disclosure, CARs of the present disclosure, or cells expressing CARs of the present disclosure, e.g., CART cells) can be used to treat a disease or condition, e.g., a proliferative disease such as a cancer or malignancy or a precancerous condition such as a myelodysplasia, a myelodysplastic syndrome or a preleukemia.

[0696] A “cancer” refers to a broad group of various proliferative diseases characterized by the uncontrolled growth of abnormal cells in the body. Unregulated cell division and growth results in the formation of malignant tumors that invade neighboring tissues and can also metastasize to distant parts of the body through the lymphatic system or bloodstream. As used herein the term “proliferative” disorder or disease refers to unwanted cell proliferation of one or more subset of cells in a multicellular organism resulting in harm (i.e., discomfort or decreased life expectancy) to the multicellular organism. For example, as used herein, proliferative disorder or disease includes neoplastic disorders and other proliferative disorders. “Neoplastic,” as used herein, refers to any form of dysregulated or unregulated cell growth, whether malignant or benign, resulting in abnormal tissue growth. Thus, “neoplastic cells” include malignant and benign cells having dysregulated or unregulated cell growth. In some aspects, the cancer is a tumor. “Tumor,” as used herein, refers to all neoplastic cell growth and proliferation, whether malignant or benign, and all pre-cancerous and cancerous cells and tissues.

[0697] In some aspects, the disease is a solid or a liquid tumor. In some aspects, the cancer is a pancreatic cancer. In some aspects, the disease is a hematologic cancer. In some aspects, the hematologic cancer is a leukemia. In some aspects, the cancer is selected from the group consisting of one or more acute leukemias including but not limited to B-cell acute lymphoid leukemia (BALL), T-cell acute lymphoid leukemia (TALL), small lymphocytic leukemia (SLL), acute lymphoid leukemia (ALL) (e.g., relapsing and refractory ALL); one or more chronic leukemias including but not limited to chronic myelogenous leukemia (CML), and chronic lymphocytic leukemia (CLL). Additional hematologic cancers or conditions include, but are not limited to mantle cell lymphoma (MCL), B cell prolymphocytic leukemia, blastic plasmacytoid dendritic cell neoplasm, Burkitt's lymphoma, diffuse large B cell lymphoma, follicular lymphoma, hairy cell leukemia, small cell- or a large cell-follicular lymphoma, malignant lymphoproliferative conditions, MALT lymphoma, Marginal zone lymphoma, multiple myeloma, myelodysplasia and myelodysplastic syndrome, non-Hodgkin lymphoma, Hodgkin lymphoma, plasmablastic lymphoma, plasmacytoid dendritic cell neoplasm, Waldenstrom macroglobulinemia, and preleukemia. Preleukemia encompasses a diverse collection of hematological conditions united by ineffective production (or dysplasia) of myeloid blood cells. In some aspects, the indication is an atypical and/or non-classical cancer, malignancy, precancerous condition or proliferative disease; and any combination thereof.

[0698] In some aspects, the disease is a lymphoma, e.g., MCL or Hodgkin lymphoma. In some aspects, the disease is leukemia, e.g., SLL, CLL and/or ALL. In some aspects, the disease associated with a tumor antigen, e.g., a tumor antigen described herein, is selected from a proliferative disease such as a cancer or malignancy or a precancerous condition such as a myelodysplasia, a myelodysplastic syndrome or a preleukemia, or is a non-cancer related indication associated with expression of a tumor antigen described herein. In some aspects, the disease associated with a tumor antigen described herein is a solid tumor, e.g., a solid tumor described herein, e.g., prostatic, colorectal, pancreatic, cervical, gastric, ovarian, head, or lung cancer.

[0699] In some aspects, the cancer is chosen from AML, ALL, B-ALL, T-ALL, B-cell prolymphocytic leukemia, chronic lymphocytic leukemia, CML, hairy cell leukemia, Hodgkin lymphoma, mast cell disorder, myelodysplastic syndrome, myeloproliferative neoplasm, plasma cell myeloma, plasmacytoid dendritic cell neoplasm, or a combination thereof.

[0700] In some aspects, the compositions disclosed herein (e.g., polynucleotides encoding CARs of the present disclosure, vectors comprising polynucleotides encoding CARs of the present disclosure, CARs of the present disclosure, or cells expressing CARs of the present disclosure, e.g., CART cells) are used to reduce or decrease a size of a tumor or inhibit a tumor growth in a subject in need thereof. In some aspects, the tumor is a carcinoma (i.e., a cancer of epithelial origin). In some aspects, the tumor is, e.g., selected from the group consisting of gastric cancer, gastroesophageal junction cancer (GEJ), esophageal cancer, colorectal cancer, liver cancer (hepatocellular carcinoma, HCC), ovarian cancer, breast cancer, NSCLC, bladder cancer, lung cancer, pancreatic cancer, head and neck cancer, lymphoma, uterine cancer, renal or kidney cancer, biliary cancer, prostate cancer, testicular cancer, urethral cancer, penile cancer, thoracic cancer, rectal cancer, brain cancer (glioma and glioblastoma), cervical cancer, parotid cancer, larynx cancer, thyroid cancer, adenocarcinomas, neuroblastomas, melanoma, and Merkel Cell carcinoma.

[0701] A “cancer” or “cancer tissue” can include a tumor at various stages. In certain aspects, the cancer or tumor is stage 0, such that, e.g., the cancer or tumor is very early in development and has not metastasized. In some aspects, the cancer or tumor is stage I, such that, e.g., the cancer or tumor is relatively small in size, has not spread into nearby tissue, and has not metastasized. In other aspects, the cancer or tumor is stage II or stage III, such that, e.g., the cancer or tumor is larger than in stage 0 or stage I, and it has grown into neighboring tissues but it has not metastasized, except potentially to the lymph nodes. In other aspects, the cancer or tumor is stage IV, such that, e.g., the cancer or tumor has metastasized. Stage IV can also be referred to as advanced or metastatic cancer.

[0702] In some aspects, the cancer can include, but is not limited to, adrenal cortical cancer, advanced cancer, anal cancer, aplastic anemia, bileduct cancer, bladder cancer, bone cancer, bone metastasis, brain tumors, brain cancer, breast cancer, childhood cancer, cancer of unknown primary origin, Castleman disease, cervical cancer, colon/rectal cancer, endometrial cancer, esophagus cancer, Ewing family of tumors, eye cancer, gallbladder cancer, gastrointestinal carcinoid tumors, gastrointestinal stromal tumors, gestational trophoblastic disease, Hodgkin disease, Kaposi sarcoma, renal cell carcinoma, laryngeal and hypopharyngeal cancer, acute lymphocytic leukemia, acute myeloid leukemia, chronic lymphocytic leukemia, chronic myeloid leukemia, chronic myelomonocytic leukemia, liver cancer, non-small cell lung cancer, small cell lung cancer, lung carcinoid tumor, lymphoma of the skin, malignant mesothelioma, multiple myeloma, myelodysplastic syndrome, nasal cavity and paranasal sinus cancer, nasopharyngeal cancer, neuroblastoma, non-Hodgkin lymphoma, oral cavity and oropharyngeal cancer, osteosarcoma, ovarian cancer, pancreatic cancer, penile cancer, pituitary tumors, prostate cancer, retinoblastoma, rhabdomyosarcoma, salivary gland cancer, sarcoma in adult soft tissue, basal and squamous cell skin cancer, melanoma, small intestine cancer, stomach cancer, testicular cancer, throat cancer, thymus cancer, thyroid cancer, uterine sarcoma, vaginal cancer, vulvar cancer, Waldenstrom macroglobulinemia, Wilms tumor and secondary cancers caused by cancer treatment.

[0703] In some aspects, the tumor is a solid tumor. A “solid tumor” includes, but is not limited to, sarcoma, melanoma, carcinoma, or other solid tumor cancer. “Sarcoma” refers to a tumor which is made up of a substance like the embryonic connective tissue and is generally composed of closely packed cells embedded in a fibrillar or homogeneous substance. Sarcomas include, but are not limited to, chondrosarcoma, fibrosarcoma, lymphosarcoma, melanosarcoma, myxosarcoma, osteosarcoma, Abemethy's sarcoma, adipose sarcoma, liposarcoma, alveolar soft part sarcoma, ameloblastic sarcoma, botryoid sarcoma, chloroma sarcoma, chorio carcinoma, embryonal sarcoma, Wilms' tumor sarcoma, endometrial sarcoma, stromal sarcoma, Ewing's sarcoma, fascial sarcoma, fibroblastic sarcoma, giant cell sarcoma, granulocytic sarcoma, Hodgkin's sarcoma, idiopathic multiple pigmented hemorrhagic sarcoma, immunoblastic sarcoma of B cells, lymphoma, immunoblastic sarcoma of T-cells, Jensen's sarcoma, Kaposi's sarcoma, Kupffer cell sarcoma, angiosarcoma, leukosarcoma, malignant mesenchymoma sarcoma, parosteal sarcoma, reticulocytic sarcoma, Rous sarcoma, serocystic sarcoma, synovial sarcoma, or telangiectaltic sarcoma.

[0704] The term “melanoma” refers to a tumor arising from the melanocytic system of the skin and other organs. Melanomas include, for example, acra-lentiginous melanoma, amelanotic melanoma, benign juvenile melanoma, Cloudman's melanoma, S91 melanoma, Harding-Passey melanoma, juvenile melanoma, lentigo maligna melanoma, malignant melanoma, metastatic melanoma, nodular melanoma, subungal melanoma, or superficial spreading melanoma.

[0705] The term “carcinoma” refers to a malignant new growth made up of epithelial cells tending to infiltrate the surrounding tissues and give rise to metastases. Exemplary carcinomas include, e.g., acinar carcinoma, acinous carcinoma, adenocystic carcinoma, adenoid cystic carcinoma, carcinoma adenomatosum, carcinoma of adrenal cortex, alveolar carcinoma, alveolar cell carcinoma, basal cell carcinoma, carcinoma basocellulare, basaloid carcinoma, basosquamous cell carcinoma, bronchioalveolar carcinoma, bronchiolar carcinoma, bronchogenic carcinoma, cerebriform carcinoma, cholangiocellular carcinoma, chorionic carcinoma, colloid carcinoma, comedo carcinoma, corpus carcinoma, cribriform carcinoma, carcinoma en cuirasse, carcinoma cutaneum, cylindrical carcinoma, cylindrical cell carcinoma, duct carcinoma, carcinoma durum, embryonal carcinoma, encephaloid carcinoma, epiermoid carcinoma, carcinoma epitheliale adenoides, exophytic carcinoma, carcinoma ex ulcere, carcinoma fibrosum, gelatiniform carcinoma, gelatinous carcinoma, giant cell carcinoma, carcinoma gigantocellulare, glandular carcinoma, granulosa cell carcinoma, hair-matrix carcinoma, hematoid carcinoma, hepatocellular carcinoma, Hurthle cell carcinoma, hyaline carcinoma, hypemephroid carcinoma, infantile embryonal carcinoma, carcinoma in situ, intraepidermal carcinoma, intraepithelial carcinoma, Krompecher's carcinoma, Kulchitzky-cell carcinoma, large-cell carcinoma, lenticular carcinoma, carcinoma lenticulare, lipomatous carcinoma, lymphoepithelial carcinoma, carcinoma medullare, medullary carcinoma, melanotic carcinoma, carcinoma molle, mucinous carcinoma, carcinoma muciparum, carcinoma mucocellulare, mucoepidernoid carcinoma, carcinoma mucosum, mucous carcinoma, carcinoma myxomatodes, naspharyngeal carcinoma, oat cell carcinoma, carcinoma ossificans, osteoid carcinoma, papillary carcinoma, periportal carcinoma, preinvasive carcinoma, prickle cell carcinoma, pultaceous carcinoma, renal cell carcinoma of kidney, reserve cell carcinoma, carcinoma sarcomatodes, schneiderian carcinoma, scirrhous carcinoma, carcinoma scroti, signet-ring cell carcinoma, carcinoma simplex, small-cell carcinoma, solanoid carcinoma, spheroidal cell carcinoma, spindle cell carcinoma, carcinoma spongiosum, squamous carcinoma, squamous cell carcinoma, string carcinoma, carcinoma telangiectaticum, carcinoma telangiectodes, transitional cell carcinoma, carcinoma tuberosum, tuberous carcinoma, verrucous carcinoma, or carcinoma viflosum.

[0706] Additional cancers that can be treated with the compositions disclosed herein (e.g., polynucleotides encoding CARs of the present disclosure, vectors comprising polynucleotides encoding CARs of the present disclosure, CARs of the present disclosure, or cells expressing CARs of the present disclosure, e.g., CART cells) include, e.g., Leukemia, Hodgkin's Disease, Non-Hodgkin's Lymphoma, multiple myeloma, neuroblastoma, breast cancer, ovarian cancer, lung cancer, rhabdomyosarcoma, primary thrombocytosis, primary macroglobulinemia, small-cell lung tumors, primary brain tumors, stomach cancer, colon cancer, malignant pancreatic insulanoma, malignant carcinoid, urinary bladder cancer, premalignant skin lesions, testicular cancer, lymphomas, thyroid cancer, papillary thyroid cancer, neuroblastoma, neuroendocrine cancer, esophageal cancer, genitourinary tract cancer, malignant hypercalcemia, cervical cancer, endometrial cancer, adrenal cortical cancer, prostate cancer, Mullerian cancer, ovarian cancer, peritoneal cancer, fallopian tube cancer, or uterine papillary serous carcinoma.

### Methods

[0707] The present disclosure also provide methods for using of the CARs and CAR-expressing cells of the present disclosure for adoptive therapy. In some aspects, the present disclosure provides a method of stimulating a T cell-mediated immune response to a target cell population or tissue in a subject, comprising administering an effective amount of a cell expressing a CAR of the present disclosure to the subject. Also provided is a method of providing an anti-tumor immunity in a subject in need thereof, the method comprising administering to the subject an effective amount of a cell expressing a CAR of the present disclosure to the subject.

[0708] The disclosure also provides a method of treating cancer in a subject in need thereof comprising administering to the subject an effective amount of a cell expressing a CAR of the present disclosure. The disclosure also provides a method of preparing a population of cells, e.g. CART cells, for a therapy comprising transducing a population of cells isolated from a subject with the a polynucleotide or vector of the present disclosure. In some aspects, the transduction comprises culturing the cell under suitable condition.

[0709] The disclosure also provides a method of generating a persisting population of genetically engineered cells in a subject diagnosed with cancer, the method comprising administering to the subject a cell genetically engineered to express a CAR of the present disclosure.

[0710] The disclosure also provides a method of expanding a population of genetically engineered cells (e.g., T cells) in a subject diagnosed with cancer, the method comprising administering to the subject a cell (e.g., a T cell) genetically engineered to express a CAR of the present disclosure. In some aspects, the cell is a T cell, e.g., an autologous T cell. In other aspects, the T cell is a heterologous T cell. In some aspects of the methods disclosed herein, the subject is a human subject.

[0711] The present disclosure also provides a method to improve one or more properties of a CAR therapy comprising inserting an CAR spacer of the present disclosure between an antigen-binding domain and a transmembrane domain of a CAR, wherein the spacer is located between the ligand-binding domain and the transmembrane domain.

[0712] In some aspects, the one or more improved properties of the CAR therapy is increased secretion of one or more cytokines. In some aspects, the cytokine secretion induced by the CAR of the present disclosure, i.e., a CAR comprising a CAR spacer of the present disclosure, is increased with respect to the secretion observed after administration of a corresponding CAR comprising a reference spacer, e.g., an IgG1 hinge spacer. In some aspects, the cytokine is an interleukin, e.g., interleukin-2. In some aspect, the cytokine is an interferon, e.g., interferon-gamma.

[0713] In some aspects, administration of a CAR of the present disclosure results in an increase in interleukin (e.g., interleukin-2) secretion by at least about 10%, at least about 15%, at least about 20%, at least about 25%, at least about 30%, at least about 35%, at least about 40%, at least about 45%, at least about 50%, at least about 55%, at least about 60%, at least about 65%, at least about 70%, at least about 75%, at least about 80%, at least about 85%, at least about 90%, at least about 95%, or at least about 100% compared to the interleukin secretion observed after administration of a corresponding CAR comprising a reference spacer, e.g., an IgG1 hinge CAR spacer or a “short” reference spacer (SEQ ID NO:4911), instead of a CAR spacer of the present disclosure.

[0714] In some aspects, administration of a CAR of the present disclosure results in an increase in interferon (e.g., interferon-gamma) secretion by at least about 10%, at least about 15%, at least about 20%, at least about 25%, at least about 30%, at least about 35%, at least about 40%, at least about 45%, at least about 50%, at least about 55%, at least about 60%, at least about 65%, at least about 70%, at least about 75%, at least about 80%, at least about 85%, at least about 90%, at least about 95%, or at least about 100% compared to the interferon (e.g., interferon-gamma) secretion observed after administration of a corresponding CAR comprising a reference spacer, e.g., an IgG1 hinge CAR spacer or a “short” reference spacer (SEQ ID NO:4911), instead of a CAR spacer of the present disclosure.

[0715] In some aspects, administration of a CAR of the present disclosure results in an increase in TNFα secretion by at least about 10%, at least about 15%, at least about 20%, at least about 25%, at least about 30%, at least about 35%, at least about 40%, at least about 45%, at least about 50%, at least about 55%, at least about 60%, at least about 65%, at least about 70%, at least about 75%, at least about 80%, at least about 85%, at least about 90%, at least about 95%, or at least about 100% compared to the TNFα secretion observed after administration of a corresponding CAR comprising a reference spacer, e.g., an IgG1 hinge CAR spacer or a “short” reference spacer (SEQ ID NO:4911), instead of a CAR spacer of the present disclosure.

[0716] In some aspects, the present disclosure provides a method to select an optimal CAR spacer comprising comparing killing kinetics (Area Under Curve) versus cytokine (e.g., IL-2 and/or IFNg) in a library of CARs differing in the spacer used (e.g., the spacer is a spacer from the library provided in FIG. 9 or any spacer disclosed herein), and selecting the CAR with the lowest AUC and/or highest cytokine. Also provided is a method to optimize or improve a CAR comprising replacing the CAR's original spacer with a spacer disclosed herein (e.g., a spacer from the library provided in FIG. 9 or any spacer disclosed herein), comparing killing kinetics (Area Under Curve) and cytokine production (e.g., IL-2 and/or IFNg), and selecting the CAR with the lowest AUC and/or highest cytokine production.

[0717] The present disclosure also provides a method to select an optimal spacer comprising generating a library of CARs differing in the spacer used (e.g., the spacer is a spacer from the library provided in FIG. 9 or any spacer disclosed herein) and performing sequential kill experiments in which CAR T cells are continually passaged into new target cells until the CAR T cells stop proliferating and killing. The best CAR spacers would be those present in the CAR T cells that would have a more prolonged proliferation and killing activity.

[0718] In some aspects, the present disclosure provides a polynucleotide, vector, CAR, composition, kit, cell, or the pharmaceutical composition of the present disclosure for use as a medicament. In some aspects, the present disclosure provides a polynucleotide, vector, CAR, composition, kit, cell, or the pharmaceutical composition of the present disclosure for use as a medicament for the treatment of cancer in a subject in need thereof. In some aspects, the present disclosure provides a polynucleotide, vector, CAR, composition, kit, cell, or the pharmaceutical composition of the present disclosure for the treatment of cancer in a subject in need thereof. In some aspects, the present disclosure provides the use of a polynucleotide, vector, CAR, composition, kit, cell, or the pharmaceutical composition of the present disclosure for the manufacture of a medicament. In some aspects, the present disclosure provides the use of a polynucleotide, vector, CAR, composition, kit, cell, or the pharmaceutical composition of the present disclosure for the manufacture of a medicament for treating cancer in a subject in need thereof.

[0719] The present disclosure also provides a composition comprising a polynucleotide encoding a CAR, a vector comprising a polynucleotide encoding a CAR, or a genetically modified cell comprising a polynucleotide or a vector encoding a CAR for treating a subject in need of a CAR therapy. The present disclosure also provides a composition comprising a polynucleotide encoding a CAR, a vector comprising a polynucleotide encoding a CAR, or a genetically modified cell comprising a polynucleotide or a vector encoding a CAR for use as a medicament. Also provided is a composition comprising a polynucleotide encoding a CAR, a vector comprising a polynucleotide encoding a CAR, or a genetically modified cell comprising a polynucleotide or a vector encoding a CAR for used as treatment for cancer in a subject in need of a CAR therapy. Also provided is a composition comprising a polynucleotide encoding a CAR, a vector comprising a polynucleotide encoding a CAR, or a genetically modified cell comprising a polynucleotide or a vector encoding a CAR for the manufacture of a medicament for the treatment for cancer in a subject in need of a CAR therapy.

### Kits

[0720] The present disclosure also provides kits, or products of manufacture comprising (i) a CAR of the present disclosure (i.e., CAR comprising a CAR spacer of the present disclosure, i.e., a hinge derived CAR spacer, a loop derived CAR spacer, or a combination thereof), one or more polynucleotides encoding a CAR of the present disclosure, one or more vectors encoding a CAR of the present disclosure, or a composition comprising the polynucleotide(s) or vector(s), and optionally (ii) instructions for use, e.g., instructions for use according to the methods disclosed herein.

[0721] The disclosure also provides a kits comprising (i) a cell genetically modified to express a CAR of the present disclosure, i.e., a cell one or more polynucleotides encoding a CAR of the present disclosure, or one or more vectors encoding a CAR of the present disclosure (e.g., a T cell, a natural killer (NK) cell, an natural killer T (NKT) cell, or an ILC cell), or a pharmaceutical composition comprising the cell, and optionally (ii) instructions for use.

[0722] In some aspects, the kit or product of manufacture comprises at least a polynucleotide or vector encoding a CAR of the present disclosure, a cell genetically modified to express a CAR of the present disclosure, or a composition (e.g., a pharmaceutical composition) comprising a polynucleotide, vector, or cell disclosed herein, in one or more containers.

[0723] In some aspects, the kit or product of manufacture comprises at least a polynucleotide or vector encoding a CAR of the present disclosure, a cell genetically modified to express a CAR of the present disclosure, or a composition (e.g., a pharmaceutical composition) comprising a polynucleotide, vector, or cell disclosed herein, and optionally a brochure.

[0724] One skilled in the art will readily recognize that the polynucleotides, vectors, cells, and compositions of the present disclosure, pharmaceutical composition comprising the polynucleotides, vectors, or cells of the present disclosure, or combinations thereof can be readily incorporated into one of the established kit formats which are well known in the art.

[0725] In some aspects, the kit or product of manufacture comprises, e.g., a polynucleotide or vector encoding a CAR of the present disclosure, or a composition (e.g., a pharmaceutical composition) comprising a polynucleotide, vector, in dry form in a container (e.g., a glass vial), and optionally a vial with a solvent.

[0726] In some aspects, the kit or product of manufacture comprises, e.g., a polynucleotide or vector encoding a CAR of the present disclosure, or a composition (e.g., a pharmaceutical composition) comprising a polynucleotide, vector, in at least one container, and another or more containers with transfection reagents.

[0727] The practice of the present disclosure will employ, unless otherwise indicated, conventional techniques of cell biology, cell culture, molecular biology, transgenic biology, microbiology, recombinant DNA, and immunology, which are within the skill of the art. Such techniques are explained fully in the literature. See, for example, Sambrook et al., ed. (1989) Molecular Cloning A Laboratory Manual (2nd ed.; Cold Spring Harbor Laboratory Press); Sambrook et al., ed. (1992) Molecular Cloning: A Laboratory Manual, (Cold Springs Harbor Laboratory, NY); D. N. Glover ed., (1985) DNA Cloning, Volumes I and II; Gait, ed. (1984) Oligonucleotide Synthesis; Mullis et al. U.S. Pat. No. 4,683,195; Hames and Higgins, eds. (1984) Nucleic Acid Hybridization; Hames and Higgins, eds. (1984) Transcription And Translation; Freshney (1987) Culture Of Animal Cells (Alan R. Liss, Inc.); Immobilized Cells And Enzymes (IRL Press) (1986); Perbal (1984) A Practical Guide To Molecular Cloning; the treatise, Methods In Enzymology (Academic Press, Inc., N.Y.); Miller and Calos eds. (1987) Gene Transfer Vectors For Mammalian Cells, (Cold Spring Harbor Laboratory); Wu et al., eds., Methods In Enzymology, Vols. 154 and 155; Mayer and Walker, eds. (1987) Immunochemical Methods In Cell And Molecular Biology (Academic Press, London); Weir and Blackwell, eds., (1986) Handbook Of Experimental Immunology, Volumes I-IV; Manipulating the Mouse Embryo, Cold Spring Harbor Laboratory Press, Cold Spring Harbor, N.Y., (1986);); Crooke, Antisense drug Technology: Principles, Strategies and Applications, 2nd Ed. CRC Press (2007) and in Ausubel et al. (1989) Current Protocols in Molecular Biology (John Wiley and Sons, Baltimore, Md.).

[0728] The following examples are offered by way of illustration and not by way of limitation.

### EXAMPLES

### Materials and Methods

[0729] To measure CAR expression and Transduction Efficiency, approximately 0.5×10⁶ cells were pelleted after a 6-day culturing post-transduction for flow cytometry analysis. Cells were resuspended in Fixable Viability Dye eFluor 780 (Invitrogen, Cat #65-0865-14) in PBS for 10 minutes, then washed with Cell Staining Buffer (BioLegend, Cat #420201).

[0730] FMC63 CARs scFv surface expression was detected using an anti-ID-AF647 (Lyell) diluted 1:2000 in Cell Staining Buffer. Transduction Efficiency was determined by surface staining of transduction marker EGFRt using anti-hEGFR-BV421 (BioLegend, Cat #352911) diluted 1:40 in Cell Staining Buffer. Cells were pelleted after a 20 minutes incubation in the dark, followed by 2× wash with Cell Staining Buffer. All flow cytometric analysis was done on a ZE5 Cell Analyzer (Biorad) and analyzed with FlowJo (Tree Star).

[0731] Her CARs scFv surface expression was detected using Protein L-Biotin (Thermo Scientific, Cat #29997) diluted 1:6000 in Cell Staining Buffer, followed by Strepavidin-BV421 (BioLegend, Cat #405226) diluted 1:400 in Cell Staining Buffer. Transduction Efficiency was determined by surface staining of transduction marker EGFRt using anti-hEGFR-PE (BioLegend, Cat #252903), diluted 1:40 in Cell Staining Buffer.

[0732] R11, R12 and 2A2 CAR scFv surface expressions were detected using hROR1-Fc-AF647 (Lyell) diluted 1:50 in Cell Staining Buffer. Transduction Efficiency was determined by surface staining of transduction marker EGFRt using anti-hEGFR-PE (BioLegend, Cat #252903), diluted 1:40 in Cell Staining Buffer.

### Example 1

### Spacer-Dependent Activity by ROR1 CAR-T Cells

[0733] This study describes the effects of various spacers on inducing autoactivation as well as ROR1-directed cytokine release and potency by T cells expressing R12 CAR. The reference CAR sequence used to test different spacer lengths and its constituent elements is shown in TABLE 20 below.

[0734] Short, intermediate, and long reference spacers were used in the experiments disclosed herein. The “short” reference spacer is an IgG4 hinge-derived spacer of SEQ ID NO: 4911. The “intermediate” reference spacer is an IgG4 hinge-derived spacer of SEQ ID NO:4912. The “long” reference spacer is an IgG4 hinge-derived spacer of SEQ ID NO: 4913.

TABLE 20
R12 Reference CAR sequences

| | |
|---|---|
| SEQ ID NO | Description |

R12 CAR with Short reference spacer CAR against ROR1
SEQ ID NO: 5070

| | |
|---|---|
| 5070 | Full sequence/840aa |
| 4874 | Signal peptide/20aa/aa 1-20 |
| 4875 | scFv/248aa/aa 21-268 |
| 4867 | Spacer/12aa/aa 269-280 |
| 4868 | Transmembrane domain/28aa/aa 281-308 |
| 4869 | 4-1BB costimulatory domain/42aa/aa 309-350 |
| 4870 | CD3z/112aa/aa 351-462 |
| 4871 | P2A/21aa/aa 463-483 |
| 4872 | EGFRt/357aa/aa 484-840 (includes signal peptide set forth |
| | in SEQ ID NO:4865; 22aa/ aa484-505) |

R12 CAR with Short reference spacer CAR against ROR1 with optional
linker SEQ ID NO: 5071

| | |
|---|---|
| 5071 | Full sequence/845aa |
| 4874 | Signal peptide/20aa/aa 1-20 |
| 4875 | scFv/248aa/aa 21-268 |
| 4818 | Optional GGGSG linker/aa 269-273 |
| 4867 | Spacer/12aa/aa 274-285 |
| 4868 | Transmembrane domain/28aa/aa 286-313 |
| 4869 | 4-1BB costimulatory domain/42aa/aa 314-355 |
| 4870 | CD3z/112aa/aa 356-467 |
| 4871 | P2A/21aa/aa 468-488 |
| 4872 | EGFRt/357aa/aa 489-845 |

[0735] Methods: All assays were set up in cytokine-free RPMI1640 media supplemented with 10% FBS (cell-assay media). H1975, Jeko1, Nalm6, Raji, A549, and T47D cell lines were purchased from ATCC. To facilitate target cell imaging via the IncuCyte Live Cell Analysis Imaging System, these cell lines were stably labeled with nuclear mKate2 by lentiviral transduction with IncuCyte NucLight Red Lentivirus Reagent (Sartorius). Area under the curve (AUC) values were calculated by integrating the area under normalized target cell killing curves.

[0736] Expression Constructs: Lentiviral constructs were generated with bi-cistronic expression cassettes. The coding sequences for (i) a ROR1-specific R12 CAR, (ii) a P2A self-cleaving peptide, and (iii) EGFRt (a truncated EGFR having only Domains III and IV and the transmembrane domain; SEQ ID NO:4868) were linked in frame and placed under the control of an MND promoter. The R12 CAR was derived from the R12 anti-ROR1 antibody (Yang et al., PLoS One. (2011) 6:e21018) and contained one of the indicated spacers, a CD28-derived transmembrane domain, a 4-1BB costimulatory domain, and a CD3 zeta signaling domain.

[0737] Estimation of spacer length: When possible, spacer lengths were measured from crystal structures available on the RCSB PDB (Protein Data Bank; http://www.rcsb.org)) using the measurement tool in a molecular visualization software (e.g. PyMOL). Residues with unresolved crystallographic coordinates, consecutive segments of missing density, or spacers for which there are no publicly available crystal structures were each modeled as extended structures with each residue spanning 3.6 Å, the Nᵢ−Nᵢ₊₁ distance in the β conformation.

[0738] Cell Culture and Lentiviral Transduction: Pre-selected, cryopreserved primary human CD4+ and CD3+ T cells from normal donors were obtained from Bloodworks (Seattle, Wash.). Human T cells were cultured in OpTmizer medium (Thermo Fisher) supplemented with Immune Cell Serum Replacement (Thermo Fisher), 2 mM L-glutamine (Gibco), 2 mM Glutamax (Gibco), 200 IU/ml IL-2 (R&D systems), 120 IU/ml IL-7 (R&D systems), and 20 IU/ml IL-15 (R&D systems). For lentiviral transduction, the T cells were stimulated with a 1:100 dilution of T cell TransAct (Miltenyi) for 30 hours. Virus was then added to the T cells for 24 hours. Stimulation and viral infection were then terminated by addition of 7 volumes of fresh media without TransAct, and cells were cultured for 7 additional days in Grex-24 plate (Wilson Wolf) prior to cryopreservation in CryoStor CS10 (STEMCELL Technologies) at 3×10⁷ cells/ml. All freshly thawed T cells were normalized for % CAR+ and total T cells by adding Mock (untransduced) T cells to appropriate samples prior to assay set-up.

[0739] CAR expression measurement via flow cytometry: To measure CAR expression levels and transduction efficiencies, roughly 0.5×10⁶ cells were pelleted after a 6-day production period following lentiviral transduction for flow cytometry analysis. Cells were resuspended in Fixable Viability Dye eFluor 780 (Invitrogen, Cat #65-0865-14) in PBS for 10 minutes, then washed with Cell Staining Buffer (BioLegend, Cat #420201).

[0740] R12 CARs scFv surface expression was detected using recombinant human ROR1-Fc chimera protein (R&D, Cat #9490-RO-050) prelabeled with DyLight™ 650 Microscale Antibody Labeling Kit (ThermoFisher, Cat #84536) diluted 1:500 in Cell Staining Buffer. Transduction efficiencies were determined by surface staining of transduction marker EGFRt using anti-hEGFR-BV421 (BioLegend, Cat #352911) diluted 1:40 in Cell Staining Buffer. Cells were pelleted after a 20 minutes incubation in the dark, followed by 2× wash with Cell Staining Buffer. All flow cytometric analysis was done on a ZE5 Cell Analyzer (Biorad) and analyzed with FlowJo (Tree Star).

[0741] Assay set-up—target-independent cytokine secretion: Cryopreserved, transduced primary T cells expressing R12 CAR with indicated spacers were each thawed, counted, and resuspended to a cell density equal to 0.5×10⁶ CAR+ cells/ml in cell-assay media. A 100 μl volume, or 50,000 CAR+ cells, were added to a flat-bottom 96 well plate and incubated in a 37° C. incubator. After 24 hours, supernatant samples from each well was collected for IFNγ measurement according to manufacturer's protocol (Meso Scale Discovery).

[0742] Assay set-up—target-dependent cytokine secretion: Cryopreserved, transduced primary T cells expressing R12 CAR with indicated spacers were each thawed, counted, resuspended to a cell density equal to 0.5×10⁶ CAR+ cells/ml in cell-assay media, and a 100 μl volume, or 50,000 CAR+ cells, were added to a flat-bottom 96 well plate containing 50,000 H1975 cells and incubated at 37° C. in an IncuCyte Live Cell Analysis System (Sartorius). Each well was imaged every 4 hours for quantifying the number of H1975 cells to assess the kinetics of T cell cytotoxicity. After 24 hours, supernatant from each well was collected for IL-2 and IFNγ measurement according to manufacturer's protocol (Meso Scale Discovery). Target cell lysis was tracked over 4 days.

[0743] Assay set-up—serial killing: Cryopreserved, transduced primary T cells expressing R12 CAR with indicated spacers were each thawed, counted, resuspended to a cell density equal to 2×10⁶ CAR+ cells/ml in cell-assay media, and a 1 ml volume, or 0.2×10⁶ CAR+ cells, were added to a 24 well plate containing 0.2×10⁶ Jeko1 cells in 1 ml cell-assay media and incubated at 37C in an IncuCyte Live Cell Analysis System (Sartorius). Each well was imaged every 4 hours for quantifying the number of Jeko1 cells to assess the kinetics of T cell cytotoxicity. At 68 hr and 148 hr time points, 0.5 ml was transferred from the previous co-culture plate to a new 24 well plate containing 0.2×10⁶ fresh Jeko1 cells in 1.5 ml cell-assay media. The numbers of remaining Jeko1 cells over the 3 rounds of co-culture with R12 CART cells were tracked and normalized to the first time point of each round (i.e. 0 hr, 68 hr and 148 hr).

[0744] Results: The results show varying levels of target-independent IFN-γ secretion by the T cells expressing different spacers as a component of the CAR design (FIG. 10). Spacers 20 and 23 in particular induced R12 CART cells to behave in an overtly autoactivating manner, leading to increased levels of IFN-γ detection. The benchmark spacer, ‘Short’, also secreted elevated levels of IFN-γ in the absence of the target antigen, human ROR1. The rest of the indicated spacers exhibited low levels of target-independent activation in R12 CART cells.

[0745] The results also indica

[0746] to varying levels of target-dependent IFN-γ and IL-2 secretion by the T cells expressing different spacers as a component of the CAR design (FIG. 11A). Spacer 1 in particular elicited R12 CART cells to secrete the highest level of IL-2 while spacer 14 in particular caused them to secrete the highest level of IFN-γ. In the context of spacer lengths, both IFN-γ and IL-2 output by the T cells were highest when CAR spacer lengths were between 43.2 Å and 75.6 Å (FIG. 11B). The full range of spacer lengths tested using R12 CAR was 43.2 Å˜248.4 Å.

[0747] The R12 CART with the benchmark spacer, ‘Short’, that also secreted high levels of IFN-γ and IL-2 following exposure to H1975 cells contains a spacer that is 43.2 Å long. The cytokine output by the R12 CART cells correlated with their target lytic capabilities, as measured by their associated AUC values (FIG. 11C).

[0748] The cytokine secretion profile correlated with the prolonged cytotoxic capabilities by the R12 CART cells as five of the spacers (Spacers 1, 11, 13, 14, and Short) that were between 43.2 A and 75.6 Å in length were able to sustain potent target lytic activities over the 3 rounds of target exposure (FIGS. 12A, 12B, 12C, 12D, and 12E). The full range of spacer lengths tested using R12 CAR was 43.2 Å˜248.4 Å. The R12 CART with the benchmark spacer, ‘Short’, that also demonstrated sustained cytotoxic activity against Jeko1 cells contained a spacer that was 43.2 Å long.

TABLE 21
Complete ROR1 CAR sequences. The spacer used in each
ROR1 CAR is indicated in
the first column. Spacer numbering follows FIG. 9 numbering.

| | Complete CAR SEQ ID NO | Complete CAR SEQ ID NO |
|---|---|---|
| Spacer | without optional linker | with optional linker |
| 1 | 5072 | 5049 |
| 11 | 5073 | 5065 |
| 13 | 5074 | 5066 |
| 14 | 5075 | 5067 |

TABLE 21A
Components of R12 CAR sequences w/ Spacer 1

| | |
|---|---|
| SEQ ID NO | Description |

R12 CAR with spacer 1 CAR against ROR1

| | |
|---|---|
| 4874 | Signal peptide/20aa |
| 4875 | scFv/248aa |
| 4830 | Spacer 1 |
| 4868 | Transmembrane domain/28aa |
| 4869 | 4-1BB costimulatory domain/42aa |
| 4870 | CD3z/112aa |
| 4871 | P2A/21aa |
| 4872 | EGFRt/357aa (includes 22aa signal peptide set |
| | forth in SEQ ID NO:4865) |

R12 CAR comprising spacer 1 targeting ROR1 (with optional
linker)

| | |
|---|---|
| 4874 | Signal peptide/20aa |
| 4875 | scFv/245aa |
| 4818 | Optional GGGSG linker |
| 4830 | Spacer 1 |
| 4868 | Transmembrane domain/28aa |
| 4869 | 4-1BB costimulatory domain/42aa |
| 4870 | CD3z/112aa |
| 4871 | P2A/21aa |
| 4865 | Signal peptide/22aa |
| 5064 | EGFRt/335 aa |

TABLE 21B
Components of R12 CAR sequences w/ Spacer 2

| | |
|---|---|
| SEQ ID NO | Description |

R12 CAR comprising spacer 2 targeting ROR1

| | |
|---|---|
| 4874 | Signal peptide/20aa |
| 4875 | scFv/248aa |
| 4831 | Spacer 2 |
| 4868 | Transmembrane domain/28aa |
| 4869 | 4-1BB costimulatory domain/42aa |
| 4870 | CD3z/112aa |
| 4871 | P2A/21aa |
| 4865 | Signal peptide/22aa |
| 5064 | EGFRt/335aa |

R12 CAR comprising spacer 2 targeting ROR1 (with optional linker)

| | |
|---|---|
| 4874 | Signal peptide/20aa |
| 4875 | scFv/248aa |
| 4818 | Optional GGGSG linker |
| 4831 | Spacer 2 |
| 4868 | Transmembrane domain/28aa |
| 4869 | 4-1BB costimulatory domain/42aa |
| 4870 | CD3z/112aa |
| 4871 | P2A/ 21aa |
| 4865 | Signal peptide/22aa |
| 5064 | EGFRt/335aa |

TABLE 21C
Components of R12 CAR sequences w/ Spacer 3

| | |
|---|---|
| SEQ ID NO | Description |

R12 CAR comprising spacer 3 targeting ROR1

| | |
|---|---|
| 4874 | Signal peptide/20aa |
| 4875 | scFv/248aa |
| 4832 | Spacer 3 |
| 4868 | Transmembrane domain/28aa |
| 4869 | 4-1BB costimulatory domain/42aa |
| 4870 | CD3z/112aa |
| 4871 | P2A/21aa |
| 4865 | Signal peptide/22aa |
| 5064 | EGFRt/335aa |

R12 CAR comprising spacer 3 targeting ROR1 (with optional linker)

| | |
|---|---|
| 4874 | Signal peptide/20aa |
| 4875 | scFv/248aa |
| 4818 | Optional GGGSG linker |
| 4832 | Spacer 3 |
| 4868 | Transmembrane domain/28aa |
| 4869 | 4-1BB costimulatory domain/42aa |
| 4870 | CD3z/112aa |
| 4871 | P2A/21aa |
| 4865 | Signal peptide/22aa |
| 5064 | EGFRt/335aa |

### Example 2

### Spacer Dependent Activity by CD19 CAR-T Cells

[0749] This study describes the effects of various Ig-derived spacers on inducing CAR-T auto-activation, as well as human CD19 directed cytokine release and potency. The reference CAR sequence used to test different spacer lengths and its constituent elements is shown in TABLE 22 below. The same experimental methods used in example 1 were used in the present example.

TABLE 22
FMC63 Reference CAR sequences

| | |
|---|---|
| SEQ ID NO | Description |

FMC63 CAR comprising short reference spacer targeting CD19
SEQ ID NO:5076

| | |
|---|---|
| 5076 | Full sequence/837aa |
| 4874 | Signal peptide/20aa/aa 1-20 |
| 4866 | scFv/245aa/aa 21-268 |
| 4876 | Spacer/12aa/aa 266-277 |
| 4877 | Transmembrane domain/28aa/aa 278-305 |
| 4878 | 4-1BB costimulatory domain/42aa/aa 306-347 |
| 4879 | CD3z/112aa/aa 348-459 |
| 4880 | P2A/21aa/aa 460-480 |
| 4865 | Signal peptide/22aa |
| 5064 | EGFRt/335aa/aa 503-837 |

FMC63 CAR components comprising short reference spacer targeting
CD19 (with optional linker)

| | |
|---|---|
| 4874 | Signal peptide/20aa/aa 1-20 |
| 4866 | scFv/245aa/aa 21-265 |
| 5088 | Optional GGGGSG linker |
| 4876 | Spacer/12aa |
| 4877 | Transmembrane domain/28aa |
| 4878 | 4-1BB costimulatory domain/42aa |
| 4879 | CD3z/112aa |
| 4880 | P2A/21aa |
| 4865 | Signal peptide/22aa |
| 4881 | EGFRt/335aa |

[0750] CD19-specific FMC63 CARs were delivered using lentiviral constructs coding for bi-cistronic expression cassettes. The coding sequences for (i) a CD19-specific FMC63 CAR (ii) a P2A self-cleaving peptide, and (iii) EGFRt (a truncated EGFR having only Domains III and IV and the transmembrane domain; SEQ ID NO:4877) were linked in frame and placed under the control of an MND promoter. The FMC63 CARs were derived from the FMC63 anti-CD19 antibodies and contained one of the indicated spacers, a CD28-derived transmembrane domain, a 4-1BB costimulatory domain, and a CD3 zeta signaling domain. Exemplary CAR constructs, e.g., with Spacer 1, Spacer 2, and Spacer 3, are shown below.

TABLE 23
Complete CD19 CAR sequences. The spacer used in each CD19 CAR is indicated in the
first column. Spacer numbering follows FIG. 9 numbering.

| | Complete CAR SEQ ID NO | Complete CAR SEQ ID NO |
|---|---|---|
| Spacer | without optional linker | with optional linker |
| 7 | SEQ ID NO:5077 without optional GGGGSG | 5077 |
| | linker of SEQ ID NO: 5088 before Spacer 7 | |
| 8 | SEQ ID NO:5078 without optional GGGGSG | 5078 |
| | linker of SEQ ID NO: 5088 before Spacer 8 | |
| 9 | SEQ ID NO:5079 without optional GGGGSG | 5079 |
| | linker of SEQ ID NO: 5088 before Spacer 9 | |
| 10 | SEQ ID NO:5080 without optional GGGGSG | 5080 |
| | linker of SEQ ID NO: 5088 before Spacer 10 | |
| 11 | SEQ ID NO:5081 without optional GGGGSG | 5081 |
| | linker of SEQ ID NO: 5088 before Spacer 11 | |
| 14 | SEQ ID NO:5082 without optional GGGGSG | 5082 |
| | linker of SEQ ID NO: 5088 before Spacer 14 | |
| 16 | SEQ ID NO:5083 without optional GGGGSG | 5083 |
| | linker of SEQ ID NO: 5088 before Spacer 16 | |
| 28 | SEQ ID NO:5084 without optional GGGGSG | 5084 |
| | linker of SEQ ID NO: 5088 before Spacer 24 | |

TABLE 23A
Components of FMC63 CAR sequences with Spacer 1

| | |
|---|---|
| SEQ ID NO | Description |

FMC63 CAR comprising spacer 1 targeting CD19

| | |
|---|---|
| 4874 | Signal peptide/20aa |
| 4866 | scFv/245aa |
| 4830 | Spacer 1 |
| 4877 | Transmembrane domain/28aa |
| 4878 | 4-1BB costimulatory domain/42aa |
| 4879 | CD3z/112aa |
| 4880 | P2A/21aa |
| 4865 | Signal peptide/22aa |
| 5064 | EGFRt/335aa |

FMC63 CAR comprising spacer 1 CAR targeting CD19 with optional
linker

| | |
|---|---|
| 4874 | Signal peptide/20aa |
| 4866 | scFv/245aa |
| 5088 | Optional GGGGSG linker |
| 4830 | Spacer 1 |
| 4877 | Transmembrane domain/28aa |
| 4878 | 4-1BB costimulatory domain/42aa |
| 4879 | CD3z/112aa |
| 4880 | P2A/21aa |
| 4865 | Signal peptide/22aa |
| 5064 | EGFRt/335aa |

TABLE 23B
Components of FMC63 CAR sequences with Spacer 2

| | |
|---|---|
| SEQ ID NO | Description |

FMC63 CAR comprising spacer 2 targeting CD19

| | |
|---|---|
| 4874 | Signal peptide/20aa |
| 4866 | scFv/245aa |
| 4831 | Spacer 2 |
| 4877 | Transmembrane domain/28aa |
| 4878 | 4-1BB costimulatory domain/42aa |
| 4879 | CD3z/112aa |
| 4880 | P2A/21aa |
| 4865 | Signal peptide/22aa |
| 5064 | EGFRt/335aa |

FMC63 CAR comprising spacer 2 targeting CD19 with optional
linker

| | |
|---|---|
| 4874 | Signal peptide/20aa |
| 4866 | scFv/245aa |
| 5088 | Optional GGGGSG linker |
| 4831 | Spacer 2 |
| 4877 | Transmembrane domain/28aa |
| 4878 | 4-1BB costimulatory domain/42aa |
| 4879 | CD3z/112aa |
| 4880 | P2A/21aa |
| 4865 | Signal peptide/22aa |
| 5064 | EGFRt/335aa |

TABLE 23C
Components of FMC63 CAR sequences with Spacer 3

| | |
|---|---|
| SEQ ID NO | Description |

FMC63 CAR comprising spacer 3 targeting CD19

| | |
|---|---|
| 4874 | Signal peptide/20aa |
| 4866 | scFv/245aa |
| 4832 | Spacer 3 |
| 4877 | Transmembrane domain/28aa |
| 4878 | 4-1BB costimulatory domain/42aa |
| 4879 | CD3z/112aa |
| 4880 | P2A/21aa |
| 4865 | Signal peptide/22aa |
| 5064 | EGFRt/335aa |

FMC63 CAR comprising spacer 3 targeting CD19 with optional linker

| | |
|---|---|
| 4874 | Signal peptide/20aa |
| 4866 | scFv/245aa |
| 5088 | Optional GGGGSG linker |
| 4832 | Spacer 3 |
| 4877 | Transmembrane domain/28aa |
| 4878 | 4-1BB costimulatory domain/42aa |
| 4879 | CD3z/112aa |
| 4880 | P2A/21aa |
| 4865 | Signal peptide/22aa |
| 5064 | EGFRt/335aa |

[0751] FMC63 CARs scFv surface expression was detected using an anti-ID-AF647 (Lyell) diluted 1:2000 in Cell Staining Buffer. Transduction Efficiency was determined by surface staining of transduction marker EGFRt using anti-hEGFR-BV421 (BioLegend, Cat #352911) diluted 1:40 in Cell Staining Buffer. Cells were pelleted after a 20 minutes incubation in the dark, followed by 2× wash with Cell Staining Buffer. All flow cytometric analysis was done on a ZE5 Cell Analyzer (Biorad) and analyzed with FlowJo (Tree Star).

[0752] Healthy donor T cells were transduced with lentiviruses encoding FMC63 CARs comprising Ig-derived spacers to a transduction level of between 40% and 80% based on EGFRt staining (FIG. 13A, FIG. 13C), and their CAR expression levels were assessed by staining with an anti-FMC63 antibody conjugated to AlexaFluor647 (FIG. 13B, FIG. 13D). CART cells were challenged with Raji-NLR (FIGS. 13A-D, 14A-E), Nalm6-NLR (FIGS. 15A-E, 16A-E), and Raji_CD19_KO-NLR (FIGS. 18A-E, 19A-E) to determine killing kinetics and target-dependent cytokine production. CART cells were also cultured in the absence of target cells to assess target-independent cytokine production, which is an indicator of autoactivation. Target-independent cytokine secretion was generally low (FIGS. 20A-C, 21A-C). The amount of cytokine production after 24-hr post co-culture correlated with faster killing kinetics, with spacers 7, 8, 9, 10, 11, 14, 16, and 28 performing especially well (FIGS. 22A-B). IFN-γ and IL-2 production were highest when CAR spacer lengths were between 50 Å and 110 Å (FIGS. 23A-D). Similarly, short term cytotoxicity was effective when spacer lengths were between 50 Å and 110 Å (FIGS. 24A-B). We observed that FMC63 CART cells comprising spacers 7, 8, 9, 10, 14, 16, and 28 were able to sustain potent target lytic activities over several rounds of target exposure (FIGS. 25A-D, 26A-D).

### Example 3

### Spacer-Dependent Activity of Her2 CAR-T Cells

[0753] This study describes the effects of various Ig-derived spacers on inducing CAR-T auto-activation, as well as Her2 directed cytokine release and potency. The same experimental methods used in example 1 were used in the present example.

[0754] Anti-Her2-derived CARs were delivered using lentiviral constructs coding for bi-cistronic expression cassettes. The coding sequences for (i) an anti-Her2-derived CAR (ii) a P2A self-cleaving peptide, and (iii) EGFRt (a truncated EGFR having only Domains III and IV and the transmembrane domain) were linked in frame and placed under the control of an MND promoter. The anti-Her2 CARs comprised scFvs derived from the trastuzumab anti-Her2 antibody and contained one of the indicated spacers, a CD28-derived transmembrane domain, a 4-1BB costimulatory domain, and a CD3 zeta signaling domain.

[0755] Anti-Her2 CARs scFv surface expression was detected using Protein L-Biotin (Thermo Scientific, Cat #29997) diluted 1:6000 in Cell Staining Buffer, followed by Strepavidin-BV421 (BioLegend, Cat #405226) diluted 1:400 in Cell Staining Buffer. Transduction Efficiency was determined by surface staining of transduction marker EGFRt using anti-hEGFR-PE (BioLegend, Cat #252903), diluted 1:40 in Cell Staining Buffer.

[0756] Healthy donor T cells were transduced with lentiviruses encoding Anti-Her2 CARs comprising Ig-derived spacers to a transduction level of between 20% and 70% based on EGFRt staining (FIG. 27A, FIG. 27C), and their CAR expression levels were assessed by staining with Protein L-Biotin, followed by Strepavidin-BV421 (FIG. 27B, FIG. 27D). CART cells were challenged with A549-NLR (FIGS. 28A-E, 29A-E), T47D-NLR (FIGS. 30A-E, 31A-E), and T47D-Her2KO-NLR (FIGS. 32A-E, 33A-E) to determine killing kinetics and target-dependent cytokine production. CAR-T cells were also cultured in the absence of target cells to assess target-independent cytokine production, which is an indicator of autoactivation. Target-independent cytokine secretion was generally low (FIGS. 34A-C, 35A-C). The amount of cytokine production after 24-hr post co-culture correlated with faster killing kinetics, with spacers 6, 7, 8, 11, 16, and Intermediate performing especially well (FIGS. 36A-D). IFN-γ and IL-2 production were highest when CAR spacer lengths were between ˜57 Å and ˜122 Å (FIGS. 37A-D). Similarly, short term cytotoxicity was effective when spacer lengths were between ˜57 Å and ˜122 Å (FIGS. 38A-D). We observed that anti-Her2-derived CART cells comprising spacers 6, 7, 8, 16, and Intermediate were best able to sustain target lytic activities over repeated rounds of target exposure (FIGS. 39A-D, FIGS. 40A-D).

TABLE 24
Complete anti-Her2 CAR sequences. The spacer used in each Her2 CAR is indicated in
the first column. Spacer numbering follows FIG. 9 numbering. The scFv linker of SEQ ID NO: 5003,
can be optionally replaced with SEQ ID NO: 5004.

| | Complete CAR SEQ ID NO | Complete CAR SEQ ID NO |
|---|---|---|
| Spacer | Without optional LINKER | With optional linker |
| 6 | 5005 | 5035 |
| 7 | 5006 | 5036 |
| 8 | 5007 | 5037 |
| 16 | 5008 | 5038 |

TABLE 25
Spacers used in Example 4 corresponding FIGS. 44A-77E.

| | Linker | Spacer | Length | | Linker | Spacer | Length |
|---|---|---|---|---|---|---|---|
| Spacer | SEQ | SEQ | (including | Spacer | SEQ | SEQ | (including |
| Identifier | ID NO | ID NO | linker) Å | Identifier | ID NO | ID NO | linker) Å |
| 1 | 4818 | 4830 | 50.4 | 25 | 4818 | 1768 | 86.4 |
| 2 | 4818 | 4831 | 57.6 | 26 | 4818 | 1889 | 79.2 |
| 3 | 4818 | 4832 | 72 | 27 | 4818 | 2015 | 68.4 |
| 4 | 4818 | 4833 | 248.4 | 28 | 4818 | 4856 | 54 |
| 5 | 4818 | 4834 | 205.2 | 29 | 4818 | 4857 | 111.6 |
| 6 | 4818 | 4835 | 187.2 | 30 | 4818 | 4858 | 54 |
| 7 | 4818 | 4836 | 133.2 | 31 | 4818 | 4859 | 61.2 |
| 8 | 4818 | 4837 | 97.2 | 41BB_1 | 4818 | 5009 | 197.6 |
| 9 | 4818 | 4838 | 79.2 | 41BB_2 | 4818 | 5010 | 138.3 |
| 10 | 4818 | 4839 | 79.2 | 41BB_3 | 4818 | 5011 | 106.7 |
| 11 | 4818 | 4840 | 75.6 | CD8a | 4818 | 5012 | 194.4 |
| 13 | 4818 | 4841 | 46.8 | CD27_1 | 4818 | 5013 | 324.4 |
| 14 | 4818 | 4842 | 57.6 | CD27_2 | 4818 | 5014 | 270 |
| 15 | 4818 | 4843 | 43.2 | CD28 | 4818 | 5015 | 158.4 |
| 16 | 4818 | 4844 | 118.8 | Short_nodisulf | 4818 | 5016 | 61.2 |
| 17 | 4818 | 4845 | 54 | Dap10 | 4818 | 5017 | 65.8 |
| 18 | 4818 | 4846 | 54 | GS_short_nodisulf | 4818 | 5018 | 61.2 |
| 19 | 4818 | 4847 | 50.4 | ICOS | 4818 | 5019 | 111.6 |
| 20 | 4818 | 4848 | 72 | OX40 | 4818 | 5020 | 190.8 |
| 21 | 4818 | 4849 | 43.2 | Intermediate | 4818 | 4912 | 104.5 |
| 22 | 4818 | 4850 | 43.2 | Long (CH2CH3) | 4818 | 4913 | 138.9 |
| 23 | 4818 | 4851 | 64.8 | Short (IgG4 Hinge) | 4818 | 4911 | 43.2 |
| 24 | 4818 | 4852 | 295.2 | | | | |

*In some aspects, the optional linker of SEQ ID NO:4818 can be replaced with a linker of SEQ ID NO:5088

### Example 4

### Spacer-Dependent Activity of ROR1 CAR-T Cells

[0757] R11 CAR: This study describes the effects of various Ig-derived or extracellular-domain-derived spacers on inducing CAR-T auto-activation, as well as human ROR1 directed cytokine release and potency. ROR1-specific R11 CARs were delivered using lentiviral constructs coding for bi-cistronic expression cassettes. The coding sequences for (i) a ROR1-specific R11 CAR, (ii) a P2A self-cleaving peptide, and (iii) EGFRt (a truncated EGFR having only Domains III and IV and the transmembrane domain; SEQ ID NO:26) were linked in frame and placed under the control of an MND promoter. The R11 CARs were derived from the R11 anti-ROR1 antibody and each comprises one of the indicated spacers, a CD28-derived transmembrane domain, a 4-1BB costimulatory domain, and a CD3 zeta signaling domain.

[0758] The results indicate varying levels of target-dependent IFN-γ and IL-2 secretion by the CAR-T cells expressing R11 CARs having different spacers as a component of the CAR design. Spacers 4 (ELKTPLGDTTHTCPRCPEPKSCDTPPPCPRCPEPKSCDTPPPCPRCPEPKSCDTPPPCPRCPAP; SEQ ID NO: 4833, or GGGGSGELKTPLGDTTHTCPRCPEPKSCDTPPPCPRCPEPKSCDTPPPCPRCPEPKSCDTPPPC PRCPAP; SEQ ID NO: 5039 when including the linker of SEQ ID NO:5088), 5 (CPRCPEPKSCDTPPPCPRCPEPKSCDTPPPCPRCPEPKSCDTPPPCPRCPAP; SEQ ID NO: 4834; or GGGGSGCPRCPEPKSCDTPPPCPRCPEPKSCDTPPPCPRCPEPKSCDTPPPCPRCPAP; SEQ ID NO: 5040 when including the link of SEQ ID NO:5088) and 6 (EPKSCDTPPPCPRCPEPKSCDTPPPCPRCPEPKSCDTPPPCPRCPAP; SEQ ID NO: 4835; or GGGGSGEPKSCDTPPPCPRCPEPKSCDTPPPCPRCPEPKSCDTPPPCPRCPAP; SEQ ID NO: 5041 when including the linker of SEQ ID NO:5088) in particular elicited R11 CAR-T cells to secrete the highest level of cytokines and the highest killing (lowest AUC in IncuCyte kinetic killing curves) in both donors. No tonic signaling was observed in any of the CAR-T cells In the context of spacer lengths, both IFN-γ and IL-2 output by the T cells were highest when CAR spacer lengths ranged from 187-248 Å. See FIGS. 44A-44D, 45A-45C, 46A-46C, 47A-47C, 48A-48B, 49A-49B, 50A-50B, 51, 52, 53A-53B, and 54A-54B.

[0759] R12 CAR: This study describes the effects of various Ig-derived or extracellular-domain-derived spacers on inducing CAR-T auto-activation, as well as human ROR1 directed cytokine release and potency. ROR1-specific R12 CARs were delivered using lentiviral constructs coding for bi-cistronic expression cassettes. The coding sequences for (i) a ROR1-specific R12 CAR, (ii) a P2A self-cleaving peptide, and (iii) EGFRt (a truncated EGFR having only Domains III and IV and the transmembrane domain; SEQ ID NO:26) were linked in frame and placed under the control of an MND promoter. The R12 CARs were derived from the R12 anti-ROR1 antibody and each comprises one of the indicated spacers, a CD28-derived transmembrane domain, a 4-1BB costimulatory domain, and a CD3 zeta signaling domain.

[0760] The results indicate varying levels of target-dependent IFN-γ and IL-2 secretion by the CAR-T cells expressing R12 CARs having different spacers as a component of the CAR design. Spacer 1 (KPCPPCKCP; SEQ ID NO: 4830; or GGGSGKPCPPCKCP; SEQ ID NO: 5042 when including the link of SEQ ID NO:4818), 15 (PPKPKDT; SEQ ID NO: 4843; or GGGSGPPKPKDT; SEQ ID NO: 5043 when including the link of SEQ ID NO:4818) and 21 (VPCPVPP; SEQ ID NO: 4849; or GGGSGVPCPVPP; SEQ ID NO: 5044 when including the link of SEQ ID NO:4818) in particular elicited R12 CAR-T cells to secrete the highest level of cytokines and the highest killing (lowest AUC in IncuCyte kinetic killing curves) in both donors.). No tonic signaling was observed in any of the CAR-T cells. In the context of spacer lengths, both IFN-γ and IL-2 output by the T cells were highest when CAR spacer lengths were approximately 45 Å. See FIGS. 55A-55D, 56A-56C, 57A-57C, 58A-58C, 59A-59B, 60A-60B, 61A-61B, 62, 63, 64A-64B, and 65A-65B.

[0761] 2A2 CAR: This study describes the effects of various Ig-derived or extracellular-domain-derived spacers on inducing CAR-T auto-activation, as well as human ROR1 directed cytokine release and potency. ROR1-specific 2A2 CARs were delivered using lentiviral constructs coding for bi-cistronic expression cassettes. The coding sequences for (i) a ROR1-specific 2A2 CAR, (ii) a P2A self-cleaving peptide, and (iii) EGFRt (a truncated EGFR having only Domains III and IV and the transmembrane domain; SEQ ID NO:26) were linked in frame and placed under the control of an MND promoter. The 2A2 CARs were derived from the 2A2 anti-ROR1 antibody and each comprises one of the indicated spacers, a CD28-derived transmembrane domain, a 4-1BB costimulatory domain, and a CD3 zeta signaling domain.

[0762] The results indicated varying levels of target-dependent IFN-γ and IL-2 secretion by the CAR-T cells expressing different spacers as a component of the CAR design. Spacer 13 (PCPRCPAP; SEQ ID NO: 4841; or GGGGSGPCPRCPAP; SEQ ID NO: 5045 when including the link of SEQ ID NO:5088), 21 (VPCPVPP; SEQ ID NO: 4849; or GGGGSGVPCPVPP; SEQ ID NO: 5044 when including the link of SEQ ID NO:5088) and 28 (SVCSRDFTPP; SEQ ID NO: 4856; or GGGGSGSVCSRDFTPP; SEQ ID NO: 5046 when including the link of SEQ ID NO:5088) in particular elicited 2A2 CAR-T cells to secrete the highest level of cytokines and the highest killing (lowest AUC in IncuCyte kinetic killing curves) in both donors. No tonic signaling was observed in any of the CAR-T cells as shown in FIG. 30 and FIG. 31.In the context of spacer lengths, both IFN-γ and IL-2 output by the T cells were highest when CAR spacer lengths were approximately 45 Å. See FIGS. 66A-66D, 67A-67C, 68A-68C, 69A-69C, 70A-70B, 71A-71B, 72A-72B, 73, 74, 75A-75B, and 76A-76B.

TABLE 26
Sequences of most active CARs identified

| | ROR1 | | |
|---|---|---|---|
| | R11 | R12 | 2A2 |
| Description | SEQ ID NO | SEQ ID NO | SEQ ID NO |
| Signal peptide | 4874 | 4874 | 4874 |
| scFv | 5048 | 4875 | 5047 |
| Gly/Ser linker | 4818 | 5088 | 4818 |
| | Spacer 4833 | 4830 (Spacer 1) | 4841 (Spacer 13) |
| (Spacer 4) | 4834 (Spacer 5) | 4843 (Spacer 15) | 4849 (Spacer 21) |
| | 4835 (Spacer 6) | 4849 (Spacer 21) | 4856 (Spacer 28) |
| Transmembrane | 4868 | 4868 | 4868 |
| domain | | | |
| 4-1BB | 4869 | 4869 | 4869 |
| costimulatory | | | |
| domain | | | |
| CD3z | 4870 | 4870 | 4870 |
| P2A | 4871 | 4871 | 4871 |
| EGFRt including | 4872 | 4872 | 4872 |
| GMCSF signal | | | |
| peptide of SEQ | | | |
| ID NO: 4865 | | | |

### Summary of Examples 1-4

[0763] The results indicated that the optimal spacer differs depending on the binder. Generally, CARs targeted against membrane-proximal epitopes prefer long spacers, and CARs targeted against membrane-distal epitopes prefer short spacers. The optimal spacer lengths for R12, 2A2, FMC63, Her and R11 CARs are shown in FIGS. 77A-77E, respectively. Full sequences of the CARs with optimal CAR spacers identified according to the methods disclosed herein are provided in TABLE 27, below. The results have demonstrated that the disclosed collection of spacers have the proper biophysical properties (e.g., shape, flexibility/rigidity) to produce highly active CARs, and the entire collection is useful for empirically determining the optimal spacer for a given CAR/target antigen pair, either my using the disclosed spacers as a screening library, or for rational design based on the dimensions of spacers, binding groups, and antigen position with respect to the signaling synapse (see FIG. 77A-77E).

TABLE 27
Full CAR sequences for CARs targeting ROR1
(CARs comprising R11, R12 and 2A2 binders),
CD19 (CARs comprising FMC63 binder), and
Her2 (CARs comprising 4D5 binder).
binders bolded
linkers italicized
spacers underlined
Constituent elements of the CAR can independently
be absent or replaced with an homologous element
disclosed herein, known in the art, or a variant
or derivative thereof. For example, a
transmembrane domain disclosed herein can be
replaced with a functionally equivalent
transmembrane domain. Likewise, one or more
of the 4-1BB costimulatory domain, CD3z domain,
P2A domain, or EGFRt domain can be replaced
with a functionally equivalent domain.

| | | |
|---|---|---|
| | Complete | |
| | CAR | |
| | SEQ ID | |
| Spacer | NO | Sequence |

R12 CARs against ROR1

| | | |
|---|---|---|
| 1 | 5049 | MVLQTQVFISLLLWISGAYGQEQLVESGGRLVTPGGSLTLSCKASGEDFSAYYMSWVRQAPGKG |
| | | LEWIATIYPSSGKTYYATWVNGRFTISSDNAQNTVDLQMNSLTAADRATYFCARDSYADDGALE |
| | | NIWGPGTLVTISSGGGGSGGGGSGGGGSELVLTQSPSVSAALGSPAKITCTLSSAHKTDTIDWY |
| | | QQLQGEAPRYLMQVQSDGSYTKRPGVPDRFSGSSSGADRYLIIPSVQADDEADYYCGADYIGGY |
| | | VFGGGTQLTVTGGGGSGKPCPPCKCPMFWVLVVVGGVLACYSLLVTVAFIIFWVKRGRKKLLYI |
| | | FKQPFMRPVQTTQEEDGCSCRFPEEEEGGCELRVKFSRSADAPAYQQGQNQLYNELNLGRREEY |
| | | DVLDKRRGRDPEMGGKPRRKNPQEGLYNELQKDKMAEAYSEIGMKGERRRGKGHDGLYQGLSTA |
| | | TKDTYDALHMQALPPRSGATNFSLLKQAGDVEENPGPMLLLVTSLLLCELPHPAFLLIPRKVCN |
| | | GIGIGEFKDSLSINATNIKHFKNCTSISGDLHILPVAFRGDSFTHTPPLDPQELDILKTVKEIT |
| | | GFLLIQAWPENRTDLHAFENLEIIRGRTKQHGQFSLAVVSLNITSLGLRSLKEISDGDVIISGN |
| | | KNLCYANTINWKKLFGTSGQKTKIISNRGENSCKATGQVCHALCSPEGCWGPEPRDCVSCRNVS |
| | | RGRECVDKCNLLEGEPREFVENSECIQCHPECLPQAMNITCTGRGPDNCIQCAHYIDGPHCVKT |
| | | CPAGVMGENNTLVWKYADAGHVCHLCHPNCTYGCTGPGLEGCPTNGPKIPSIATGMVGALLLLL |
| | | VVALGIGLFM |
| 15 | 5050 | MVLQTQVFISLLLWISGAYGQEQLVESGGRLVTPGGSLTLSCKASGEDFSAYYMSWVRQAPGKG |
| | | LEWIATIYPSSGKTYYATWVNGRFTISSDNAQNTVDLQMNSLTAADRATYFCARDSYADDGALE |
| | | NIWGPGTLVTISSGGGGSGGGGSGGGGSELVLTQSPSVSAALGSPAKITCTLSSAHKTDTIDWY |
| | | QQLQGEAPRYLMQVQSDGSYTKRPGVPDRFSGSSSGADRYLIIPSVQADDEADYYCGADYIGGY |
| | | VFGGGTQLTVTGGGGSGPPKPKDTMFWVLVVVGGVLACYSLLVTVAFIIFWVKRGRKKLLYIFK |
| | | QPFMRPVQTTQEEDGCSCRFPEEEEGGCELRVKFSRSADAPAYQQGQNQLYNELNLGRREEYDV |
| | | LDKRRGRDPEMGGKPRRKNPQEGLYNELQKDKMAEAYSEIGMKGERRRGKGHDGLYQGLSTATK |
| | | DTYDALHMQALPPRSGATNFSLLKQAGDVEENPGPMLLLVTSLLLCELPHPAFLLIPRKVCNGI |
| | | GIGEFKDSLSINATNIKHFKNCTSISGDLHILPVAFRGDSFTHTPPLDPQELDILKTVKEITGE |
| | | LLIQAWPENRTDLHAFENLEIIRGRTKQHGQFSLAVVSLNITSLGLRSLKEISDGDVIISGNKN |
| | | LCYANTINWKKLFGTSGQKTKIISNRGENSCKATGQVCHALCSPEGCWGPEPRDCVSCRNVSRG |
| | | RECVDKCNLLEGEPREFVENSECIQCHPECLPQAMNITCTGRGPDNCIQCAHYIDGPHCVKTCP |
| | | AGVMGENNTLVWKYADAGHVCHLCHPNCTYGCTGPGLEGCPTNGPKIPSIATGMVGALLLLLVV |
| | | ALGIGLFM |
| 21 | 5051 | MVLQTQVFISLLLWISGAYGQEQLVESGGRLVTPGGSLTLSCKASGEDFSAYYMSWVRQAPGKG |
| | | LEWIATIYPSSGKTYYATWVNGRFTISSDNAQNTVDLQMNSLTAADRATYFCARDSYADDGALF |
| | | NIWGPGTLVTISSGGGGSGGGGSGGGGSELVLTQSPSVSAALGSPAKITCTLSSAHKTDTIDWY |
| | | QQLQGEAPRYLMQVQSDGSYTKRPGVPDRFSGSSSGADRYLIIPSVQADDEADYYCGADYIGGY |
| | | VFGGGTQLTVTGGGGSGVPCPVPPMFWVLVVVGGVLACYSLLVTVAFTIFWVKRGRKKLLYIFK |
| | | QPFMRPVQTTQEEDGCSCREPEEEEGGCELRVKFSRSADAPAYQQGQNQLYNELNLGRREEYDV |
| | | LDKRRGRDPEMGGKPRRKNPQEGLYNELQKDKMAEAYSEIGMKGERRRGKGHDGLYQGLSTATK |
| | | DTYDALHMQALPPRSGATNFSLLKQAGDVEENPGPMLLLVTSLLLCELPHPAFLLIPRKVCNGI |
| | | GIGEFKDSLSINATNIKHFKNCTSISGDLHILPVAFRGDSFTHTPPLDPQELDILKTVKEITGF |
| | | LLIQAWPENRTDLHAFENLEIIRGRTKQHGQFSLAVVSLNITSLGLRSLKEISDGDVIISGNKN |
| | | LCYANTINWKKLEGTSGQKTKIISNRGENSCKATGQVCHALCSPEGCWGPEPRDCVSCRNVSRG |
| | | RECVDKCNLLEGEPREFVENSECIQCHPECLPQAMNITCTGRGPDNCIQCAHYIDGPHCVKTCP |
| | | AGVMGENNTLVWKYADAGHVCHLCHPNCTYGCTGPGLEGCPTNGPKIPSIATGMVGALLLLLVV |
| | | ALGIGLFM |

FMC63 CARs against CD19

| | | |
|---|---|---|
| 9 | 5052 | MVLQTQVFISLLLWISGAYGDIQMTQTTSSLSASLGDRVTISCRASQDISKYLNWYQQKPDGTV |
| | | KLLIYHTSRLHSGVPSRFSGSGSGTDYSLTISNLEQEDIATYFCQQGNTLPYTFGGGTKLEITG |
| | | STSGSGKPGSGEGSTKGEVKLQESGPGLVAPSQSLSVTCTVSGVSLPDYGVSWIRQPPRKGLEW |
| | | LGVIWGSETTYYNSALKSRLTIIKDNSKSQVFLKMNSLQTDDTAIYYCAKHYYYGGSYAMDYWG |
| | | QGTSVTVSSGGGGSGEPKSCDTPPPCPRCPAPMFWVLVVVGGVLACYSLLVTVAFTIFWVKRGR |
| | | KKLLYIFKQPFMRPVQTTQEEDGCSCRFPEEEEGGCELRVKFSRSADAPAYQQGQNQLYNELNL |
| | | GRREEYDVLDKRRGRDPEMGGKPRRKNPQEGLYNELQKDKMAEAYSEIGMKGERRRGKGHDGLY |
| | | QGLSTATKDTYDALHMQALPPRSGATNFSLLKQAGDVEENPGPMLLLVTSLLLCELPHPAFLLI |
| | | PRKVCNGIGIGEFKDSLSINATNIKHFKNCTSISGDLHILPVAFRGDSFTHTPPLDPQELDILK |
| | | TVKEITGFLLIQAWPENRTDLHAFENLEIIRGRTKQHGQFSLAVVSLNITSLGLRSLKEISDGD |
| | | VIISGNKNLCYANTINWKKLEGTSGQKTKIISNRGENSCKATGQVCHALCSPEGCWGPEPRDCV |
| | | SCRNVSRGRECVDKCNLLEGEPREFVENSECIQCHPECLPQAMNITCTGRGPDNCIQCAHYIDG |
| | | PHCVKTCPAGVMGENNTLVWKYADAGHVCHLCHPNCTYGCTGPGLEGCPTNGPKIPSIATGMVG |
| | | ALLLLLVVALGIGLFM |
| 10 | 5053 | MVLQTQVFISLLLWISGAYGDIQMTQTTSSLSASLGDRVTISCRASQDISKYLNWYQQKPDGTV |
| | | KLLIYHTSRLHSGVPSRFSGSGSGTDYSLTISNLEQEDIATYFCQQGNTLPYTFGGGTKLEITG |
| | | STSGSGKPGSGEGSTKGEVKLQESGPGLVAPSQSLSVTCTVSGVSLPDYGVSWIRQPPRKGLEW |
| | | LGVIWGSETTYYNSALKSRLTIIKDNSKSQVFLKMNSLQTDDTAIYYCAKHYYYGGSYAMDYWG |
| | | QGTSVTVSSGGGGSGEPKSCDKTHTCPPCPAPMFWVLVVVGGVLACYSLLVTVAFTIFWVKRGR |
| | | KKLLYIFKQPFMRPVQTTQEEDGCSCRFPEEEEGGCELRVKFSRSADAPAYQQGQNQLYNELNL |
| | | GRREEYDVLDKRRGRDPEMGGKPRRKNPQEGLYNELQKDKMAEAYSEIGMKGERRRGKGHDGLY |
| | | QGLSTATKDTYDALHMQALPPRSGATNFSLLKQAGDVEENPGPMLLLVTSLLLCELPHPAFLLI |
| | | PRKVCNGIGIGEFKDSLSINATNIKHFKNCTSISGDLHILPVAFRGDSFTHTPPLDPQELDILK |
| | | TVKEITGFLLIQAWPENRTDLHAFENLEIIRGRTKQHGQFSLAVVSLNITSLGLRSLKEISDGD |
| | | VIISGNKNLCYANTINWKKLEGTSGQKTKIISNRGENSCKATGQVCHALCSPEGCWGPEPRDCV |
| | | SCRNVSRGRECVDKCNLLEGEPREFVENSECIQCHPECLPQAMNITCTGRGPDNCIQCAHYIDG |
| | | PHCVKTCPAGVMGENNTLVWKYADAGHVCHLCHPNCTYGCTGPGLEGCPTNGPKIPSIATGMVG |
| | | ALLLLLVVALGIGLFM |
| 11 | 5054 | MVLQTQVFISLLLWISGAYGDIQMTQTTSSLSASLGDRVTISCRASQDISKYLNWYQQKPDGTV |
| | | KLLIYHTSRLHSGVPSRFSGSGSGTDYSLTISNLEQEDIATYFCQQGNTLPYTFGGGTKLEITG |
| | | STSGSGKPGSGEGSTKGEVKLQESGPGLVAPSQSLSVTCTVSGVSLPDYGVSWIRQPPRKGLEW |
| | | LGVINGSETTYYNSALKSRLTIIKDNSKSQVFLKMNSLQTDDTAIYYCAKHYYYGGSYAMDYWG |
| | | QGTSVTVSSGGGGSGPKSCDKTHTCPPCPAPMFWVLVVVGGVLACYSLLVTVAFTIFWVKRGRK |
| | | KLLYIFKQPFMRPVQTTQEEDGCSCRFPEEEEGGCELRVKFSRSADAPAYQQGQNQLYNELNLG |
| | | RREEYDVLDKRRGRDPEMGGKPRRKNPQEGLYNELQKDKMAEAYSEIGMKGERRRGKGHDGLYQ |
| | | GLSTATKDTYDALHMQALPPRSGATNFSLLKQAGDVEENPGPMLLLVTSLLLCELPHPAFLLIP |
| | | RKVCNGIGIGEFKDSLSINATNIKHFKNCTSISGDLHILPVAFRGDSFTHTPPLDPQELDILKT |
| | | VKEITGFLLIQAWPENRTDLHAFENLEIIRGRTKQHGQFSLAVVSLNITSLGLRSLKEISDGDV |
| | | IISGNKNLCYANTINWKKLEGTSGQKTKIISNRGENSCKATGQVCHALCSPEGCWGPEPRDCVS |
| | | CRNVSRGRECVDKCNLLEGEPREFVENSECIQCHPECLPQAMNITCTGRGPDNCIQCAHYIDGP |
| | | HCVKTCPAGVMGENNTLVWKYADAGHVCHLCHPNCTYGCTGPGLEGCPTNGPKIPSIATGMVGA |
| | | LLLLLVVALGIGLFM |

4D5 CARs against Her2

| | | |
|---|---|---|
| 7 | 5055 | MVLQTQVFISLLLWISGAYGDIQMTQSPSSLSASVGDRVTITCRASQDVNTAVAWYQQKPGKAP |
| | | KLLIYSASFLYSGVPSRFSGSRSGTDFTLTISSLQPEDFATYYCQQHYTTPPTFGQGTKVEIKG |
| | | STSGSGKPGSGEGSGEVQLVESGGGLVQPGGSLRLSCAASGENIKDTYIHWVRQAPGKGLEWVA |
| | | RIYPTNGYTRYADSVKGRFTISADTSKNTAYLQMNSLRAEDTAVYYCSRWGGDGFYAMDYWGQG |
| | | TLVTVSSEPKSCDTPPPCPRCPEPKSCDTPPPCPRCPAPMFWVLVVVGGVLACYSLLVTVAFII |
| | | FWVKRGRKKLLYIFKQPFMRPVQTTQEEDGCSCRFPEEEEGGCELRVKFSRSADAPAYQQGQNQ |
| | | LYNELNLGRREEYDVLDKRRGRDPEMGGKPRRKNPQEGLYNELQKDKMAEAYSEIGMKGERRRG |
| | | KGHDGLYQGLSTATKDTYDALHMQALPPRSGATNESLLKQAGDVEENPGPMLLLVTSLLLCELP |
| | | HPAFLLIPRKVCNGIGIGEFKDSLSINATNIKHFKNCTSISGDLHILPVAFRGDSFTHTPPLDP |
| | | QELDILKTVKEITGFLLIQAWPENRTDLHAFENLEIIRGRTKQHGQFSLAVVSLNITSLGLRSL |
| | | KEISDGDVIISGNKNLCYANTINWKKLEGTSGQKTKIISNRGENSCKATGQVCHALCSPEGCWG |
| | | PEPRDCVSCRNVSRGRECVDKCNLLEGEPREFVENSECIQCHPECLPQAMNITCTGRGPDNCIQ |
| | | CAHYIDGPHCVKTCPAGVMGENNTLVWKYADAGHVCHLCHPNCTYGCTGPGLEGCPTNGPKIPS |
| | | IATGMVGALLLLLVVALGIGLFM |
| 8 | 5056 | MVLQTQVFISLLLWISGAYGDIQMTQSPSSLSASVGDRVTITCRASQDVNTAVAWYQQKPGKAP |
| | | KLLIYSASFLYSGVPSRFSGSRSGTDFTLTISSLQPEDFATYYCQQHYTTPPTFGQGTKVEIKG |
| | | STSGSGKPGSGEGSGEVQLVESGGGLVQPGGSLRLSCAASGENIKDTYIHWVRQAPGKGLEWVA |
| | | RIYPTNGYTRYADSVKGRFTISADTSKNTAYLQMNSLRAEDTAVYYCSRWGGDGFYAMDYWGQG |
| | | TLVTVSSCPRCPEPKSCDTPPPCPRCPAPMFWVLVVVGGVLACYSLLVTVAFTIFWVKRGRKKL |
| | | LYIFKQPFMRPVQTTQEEDGCSCRFPEEEEGGCELRVKFSRSADAPAYQQGQNQLYNELNLGRR |
| | | EEYDVLDKRRGRDPEMGGKPRRKNPQEGLYNELQKDKMAEAYSEIGMKGERRRGKGHDGLYQGL |
| | | STATKDTYDALHMQALPPRSGATNFSLLKQAGDVEENPGPMLLLVTSLLLCELPHPAFLLIPRK |
| | | VCNGIGIGEFKDSLSINATNIKHFKNCTSISGDLHILPVAFRGDSFTHTPPLDPQELDILKTVK |
| | | EITGFLLIQAWPENRTDLHAFENLEIIRGRTKQHGQFSLAVVSLNITSLGLRSLKEISDGDVII |
| | | SGNKNLCYANTINWKKLEGTSGQKTKIISNRGENSCKATGQVCHALCSPEGCWGPEPRDCVSCR |
| | | NVSRGRECVDKCNLLEGEPREFVENSECIQCHPECLPQAMNITCTGRGPDNCIQCAHYIDGPHC |
| | | VKTCPAGVMGENNTLVWKYADAGHVCHLCHPNCTYGCTGPGLEGCPTNGPKIPSIATGMVGALL |
| | | LLLVVALGIGLFM |
| 16 | 5057 | MVLQTQVFISLLLWISGAYGDIQMTQSPSSLSASVGDRVTITCRASQDVNTAVAWYQQKPGKAP |
| | | KLLIYSASFLYSGVPSRFSGSRSGTDFTLTISSLQPEDFATYYCQQHYTTPPTFGQGTKVEIKG |
| | | STSGSGKPGSGEGSGEVQLVESGGGLVQPGGSLRLSCAASGFNIKDTYIHWVRQAPGKGLEWVA |
| | | RIYPTNGYTRYADSVKGRFTISADTSKNTAYLQMNSLRAEDTAVYYCSRWGGDGFYAMDYWGQG |
| | | TLVTVSSTVPCPVPSTPPTPSPSTPPTPSPSCCHPMFWVLVVVGGVLACYSLLVTVAFTIFWVK |
| | | RGRKKLLYIFKQPFMRPVQTTQEEDGCSCRFPEEEEGGCELRVKFSRSADAPAYQQGQNQLYNE |
| | | LNLGRREEYDVLDKRRGRDPEMGGKPRRKNPQEGLYNELQKDKMAEAYSEIGMKGERRRGKGHD |
| | | GLYQGLSTATKDTYDALHMQALPPRSGATNFSLLKQAGDVEENPGPMLLLVTSLLLCELPHPAF |
| | | LLIPRKVCNGIGIGEFKDSLSINATNIKHFKNCTSISGDLHILPVAFRGDSFTHTPPLDPQELD |
| | | ILKTVKEITGFLLIQAWPENRTDLHAFENLEIIRGRTKQHGQFSLAVVSLNITSLGLRSLKEIS |
| | | DGDVIISGNKNLCYANTINWKKLEGTSGQKTKIISNRGENSCKATGQVCHALCSPEGCWGPEPR |
| | | DCVSCRNVSRGRECVDKCNLLEGEPREFVENSECIQCHPECLPQAMNITCTGRGPDNCIQCAHY |
| | | IDGPHCVKTCPAGVMGENNTLVWKYADAGHVCHLCHPNCTYGCTGPGLEGCPTNGPKIPSIATG |
| | | MVGALLLLLVVALGIGLFM |

2A2 CARs against ROR1

| | | |
|---|---|---|
| 13 | 5058 | MVLQTQVFISLLLWISGAYGQVQLQQSGAELVRPGASVTLSCKASGYTFSDYEMHWVIQTPVHG |
| | | LEWIGAIDPETGGTAYNQKFKGKAILTADKSSSTAYMELRSLTSEDSAVYYCTGYYDYDSFTYW |
| | | GQGTLVTVSAGGGGSGGGGSGGGGSDIVMTQSQKIMSTTVGDRVSITCKASQNVDAAVAWYQQK |
| | | PGQSPKLLIYSASNRYTGVPDRFTGSGSGTDFTLTISNMQSEDLADYFCQQYDIYPYTFGGGTK |
| | | LEIKTGGGGSGPCPRCPAPMFWVLVVVGGVLACYSLLVTVAFIIFWVKRGRKKLLYIFKQPFMR |
| | | PVQTTQEEDGCSCRFPEEEEGGCELRVKFSRSADAPAYQQGQNQLYNELNLGRREEYDVLDKRR |
| | | GRDPEMGGKPRRKNPQEGLYNELQKDKMAEAYSEIGMKGERRRGKGHDGLYQGLSTATKDTYDA |
| | | LHMQALPPRSGATNFSLLKQAGDVEENPGPMLLLVTSLLLCELPHPAFLLIPRKVCNGIGIGEF |
| | | KDSLSINATNIKHFKNCTSISGDLHILPVAFRGDSFTHTPPLDPQELDILKTVKEITGFLLIQA |
| | | WPENRTDLHAFENLEIIRGRTKQHGQFSLAVVSLNITSLGLRSLKEISDGDVIISGNKNLCYAN |
| | | TINWKKLFGTSGQKTKIISNRGENSCKATGQVCHALCSPEGCWGPEPRDCVSCRNVSRGRECVD |
| | | KCNLLEGEPREFVENSECIQCHPECLPQAMNITCTGRGPDNCIQCAHYIDGPHCVKTCPAGVMG |
| | | ENNTLVWKYADAGHVCHLCHPNCTYGCTGPGLEGCPTNGPKIPSIATGMVGALLLLLVVALGIG |
| | | LFM |
| 21 | 5059 | MVLQTQVFISLLLWISGAYGQVQLQQSGAELVRPGASVTLSCKASGYTFSDYEMHWVIQTPVHG |
| | | LEWIGAIDPETGGTAYNQKFKGKAILTADKSSSTAYMELRSLTSEDSAVYYCTGYYDYDSFTYW |
| | | GQGTLVTVSAGGGGSGGGGSGGGGSDIVMTQSQKIMSTTVGDRVSITCKASQNVDAAVAWYQQK |
| | | PGQSPKLLIYSASNRYTGVPDRFTGSGSGTDFTLTISNMQSEDLADYFCQQYDIYPYTFGGGTK |
| | | LEIKTGGGGSGVPCPVPPMFWVLVVVGGVLACYSLLVTVAFIIFWVKRGRKKLLYIFKQPFMRP |
| | | VQTTQEEDGCSCRFPEEEEGGCELRVKFSRSADAPAYQQGQNQLYNELNLGRREEYDVLDKRRG |
| | | RDPEMGGKPRRKNPQEGLYNELQKDKMAEAYSEIGMKGERRRGKGHDGLYQGLSTATKDTYDAL |
| | | HMQALPPRSGATNFSLLKQAGDVEENPGPMLLLVTSLLLCELPHPAFLLIPRKVCNGIGIGEFK |
| | | DSLSINATNIKHFKNCTSISGDLHILPVAFRGDSFTHTPPLDPQELDILKTVKEITGFLLIQAW |
| | | PENRTDLHAFENLEIIRGRTKQHGQFSLAVVSLNITSLGLRSLKEISDGDVIISGNKNLCYANT |
| | | INWKKLFGTSGQKTKIISNRGENSCKATGQVCHALCSPEGCWGPEPRDCVSCRNVSRGRECVDK |
| | | CNLLEGEPREFVENSECIQCHPECLPQAMNITCTGRGPDNCIQCAHYIDGPHCVKTCPAGVMGE |
| | | NNTLVWKYADAGHVCHLCHPNCTYGCTGPGLEGCPTNGPKIPSIATGMVGALLLLLVVALGIGL |
| | | FM |
| 28 | 5960 | MVLQTQVFISLLLWISGAYGQVQLQQSGAELVRPGASVTLSCKASGYTFSDYEMHWVIQTPVHG |
| | | LEWIGAIDPETGGTAYNQKFKGKAILTADKSSSTAYMELRSLTSEDSAVYYCTGYYDYDSFTYW |
| | | GQGTLVTVSAGGGGSGGGGSGGGGSDIVMTQSQKIMSTTVGDRVSITCKASQNVDAAVAWYQQK |
| | | PGQSPKLLIYSASNRYTGVPDRFTGSGSGTDFTLTISNMQSEDLADYFCQQYDIYPYTFGGGTK |
| | | LEIKTGGGGSGSVCSRDFTPPMFWVLVVVGGVLACYSLLVTVAFIIFWVKRGRKKLLYIFKQPF |
| | | MRPVQTTQEEDGCSCRFPEEEEGGCELRVKFSRSADAPAYQQGQNQLYNELNLGRREEYDVLDK |
| | | RRGRDPEMGGKPRRKNPQEGLYNELQKDKMAEAYSEIGMKGERRRGKGHDGLYQGLSTATKDTY |
| | | DALHMQALPPRSGATNFSLLKQAGDVEENPGPMLLLVTSLLLCELPHPAFLLIPRKVCNGIGIG |
| | | EFKDSLSINATNIKHFKNCTSISGDLHILPVAFRGDSFTHTPPLDPQELDILKTVKEITGFLLI |
| | | QAWPENRTDLHAFENLEIIRGRTKQHGQFSLAVVSLNITSLGLRSLKEISDGDVIISGNKNLCY |
| | | ANTINWKKLFGTSGQKTKIISNRGENSCKATGQVCHALCSPEGCWGPEPRDCVSCRNVSRGREC |
| | | VDKCNLLEGEPREFVENSECIQCHPECLPQAMNITCTGRGPDNCIQCAHYIDGPHCVKTCPAGV |
| | | MGENNTLVWKYADAGHVCHLCHPNCTYGCTGPGLEGCPTNGPKIPSIATGMVGALLLLLVVALG |
| | | IGLFM |

R11 CARs against ROR1

| | | |
|---|---|---|
| 4 | 5061 | MVLQTQVFISLLLWISGAYGQSVKESEGDLVTPAGNLTLTCTASGSDINDYPISWVRQAPGKGL |
| | | EWIGFINSGGSTWYASWVKGRFTISRTSTTVDLKMTSLTTDDTATYFCARGYSTYYGDFNIWGP |
| | | GTLVTISSGGGGSGGGGSGGGGSELVMTQTPSSTSGAVGGTVTINCQASQSIDSNLAWFQQKPG |
| | | QPPTLLIYRASNLASGVPSRFSGSRSGTEYTLTISGVQREDAATYYCLGGVGNVSYRTSFGGGT |
| | | EVVVKTGGGGSGELKTPLGDTTHTCPRCPEPKSCDTPPPCPRCPEPKSCDTPPPCPRCPEPKSC |
| | | DTPPPCPRCPAPMFWVLVVVGGVLACYSLLVTVAFTIFWVKRGRKKLLYIFKQPFMRPVQTTQE |
| | | EDGCSCRFPEEEEGGCELRVKFSRSADAPAYQQGQNQLYNELNLGRREEYDVLDKRRGRDPEMG |
| | | GKPRRKNPQEGLYNELQKDKMAEAYSEIGMKGERRRGKGHDGLYQGLSTATKDTYDALHMQALP |
| | | PRSGATNFSLLKQAGDVEENPGPMLLLVTSLLLCELPHPAFLLIPRKVCNGIGIGEFKDSLSIN |
| | | ATNIKHFKNCTSISGDLHILPVAFRGDSFTHTPPLDPQELDILKTVKEITGFLLIQAWPENRTD |
| | | LHAFENLEIIRGRTKQHGQFSLAVVSLNITSLGLRSLKEISDGDVIISGNKNLCYANTINWKKL |
| | | FGTSGQKTKIISNRGENSCKATGQVCHALCSPEGCWGPEPRDCVSCRNVSRGRECVDKCNLLEG |
| | | EPREFVENSECIQCHPECLPQAMNITCTGRGPDNCIQCAHYIDGPHCVKTCPAGVMGENNTLVW |
| | | KYADAGHVCHLCHPNCTYGCTGPGLEGCPTNGPKIPSIATGMVGALLLLLVVALGIGLFM |
| 5 | 5062 | MVLQTQVFISLLLWISGAYGQSVKESEGDLVTPAGNLTLTCTASGSDINDYPISWVRQAPGKGL |
| | | EWIGFINSGGSTWYASWVKGRFTISRTSTTVDLKMTSLTTDDTATYFCARGYSTYYGDFNIWGP |
| | | GTLVTISSGGGGSGGGGSGGGGSELVMTQTPSSTSGAVGGTVTINCQASQSIDSNLAWFQQKPG |
| | | QPPTLLIYRASNLASGVPSRFSGSRSGTEYTLTISGVQREDAATYYCLGGVGNVSYRTSFGGGT |
| | | EVVVKTGGGGSGCPRCPEPKSCDTPPPCPRCPEPKSCDTPPPCPRCPEPKSCDTPPPCPRCPAP |
| | | MFWVLVVVGGVLACYSLLVTVAFTIFWVKRGRKKLLYIFKQPFMRPVQTTQEEDGCSCRFPEEE |
| | | EGGCELRVKFSRSADAPAYQQGQNQLYNELNLGRREEYDVLDKRRGRDPEMGGKPRRKNPQEGL |
| | | YNELQKDKMAEAYSEIGMKGERRRGKGHDGLYQGLSTATKDTYDALHMQALPPRSGATNFSLLK |
| | | QAGDVEENPGPMLLLVTSLLLCELPHPAFLLIPRKVCNGIGIGEFKDSLSINATNIKHFKNCTS |
| | | ISGDLHILPVAFRGDSFTHTPPLDPQELDILKTVKEITGFLLIQAWPENRTDLHAFENLEIIRG |
| | | RTKQHGQFSLAVVSLNITSLGLRSLKEISDGDVIISGNKNLCYANTINWKKLFGTSGQKTKIIS |
| | | NRGENSCKATGQVCHALCSPEGCWGPEPRDCVSCRNVSRGRECVDKCNLLEGEPREFVENSECI |
| | | QCHPECLPQAMNITCTGRGPDNCIQCAHYIDGPHCVKTCPAGVMGENNTLVWKYADAGHVCHLC |
| | | HPNCTYGCTGPGLEGCPTNGPKIPSIATGMVGALLLLLVVALGIGLFM |
| 6 | 5063 | MVLQTQVFISLLLWISGAYGQSVKESEGDLVTPAGNLTLTCTASGSDINDYPISWVRQAPGKGL |
| | | EWIGFINSGGSTWYASWVKGRFTISRTSTTVDLKMTSLTTDDTATYFCARGYSTYYGDFNIWGP |
| | | GTLVTISSGGGGSGGGGSGGGGSELVMTQTPSSTSGAVGGTVTINCQASQSIDSNLAWFQQKPG |
| | | QPPTLLIYRASNLASGVPSRFSGSRSGTEYTLTISGVQREDAATYYCLGGVGNVSYRTSFGGGT |
| | | EVVVKTGGGGSGEPKSCDTPPPCPRCPEPKSCDTPPPCPRCPEPKSCDTPPPCPRCPAPMFWVL |
| | | VVVGGVLACYSLLVTVAFIIFWVKRGRKKLLYIFKQPFMRPVQTTQEEDGCSCRFPEEEEGGCE |
| | | LRVKFSRSADAPAYQQGQNQLYNELNLGRREEYDVLDKRRGRDPEMGGKPRRKNPQEGLYNELQ |
| | | KDKMAEAYSEIGMKGERRRGKGHDGLYQGLSTATKDTYDALHMQALPPRSGATNESLLKQAGDV |
| | | EENPGPMLLLVTSLLLCELPHPAELLIPRKVCNGIGIGEFKDSLSINATNIKHEKNCTSISGDL |
| | | HILPVAFRGDSFTHTPPLDPQELDILKTVKEITGELLIQAWPENRTDLHAFENLETIRGRTKQH |
| | | GQFSLAVVSLNITSLGLRSLKEISDGDVIISGNKNLCYANTINWKKLFGTSGQKTKIISNRGEN |
| | | SCKATGQVCHALCSPEGCWGPEPRDCVSCRNVSRGRECVDKCNLLEGEPREFVENSECTQCHPE |
| | | CLPQAMNITCTGRGPDNCIQCAHYIDGPHCVKTCPAGVMGENNTLVWKYADAGHVCHLCHPNCT |
| | | YGCTGPGLEGCPTNGPKIPSIATGMVGALLLLLVVALGIGLFM |

TABLE 28
Summary of properties of selected CARs

| | | | Spacer | Nalm6 | Raji | | | |
|---|---|---|---|---|---|---|---|---|
| | | | Length with | normalized | normalized | Nalm6 | Nalm6 | Raji |
| Binder | Donor | Spacer | Linker (Å) | AUC | AUC | IFNg | IL-2 | IFNg |
| FMC63 | 3868 | 9 | 79.2 | 14.9 | 19.1 | 62067 | 68 | 142559 |
| FMC63 | 3868 | 10 | 79.2 | 14.2 | 18.3 | 65929 | 41 | 158893 |
| FMC63 | 3868 | 11 | 75.6 | 13.2 | 17.9 | 53252 | 23 | 146062 |
| FMC63 | 4869 | 9 | 79.2 | 14.3 | 49.5 | 53816 | 945 | 100333 |
| FMC63 | 4869 | 10 | 79.2 | 15.5 | 45.4 | 72105 | 517 | 139572 |
| FMC63 | 4869 | 11 | 75.6 | 12.2 | 46.2 | 54543 | 211 | 114046 |
| | | | | A549 | T47D | | | |
| | | | Spacer | normalized | normalized | A549 | A549 | T47D |
| Binder | Donor | Spacer | Length (Å) | AUC | AUC | IFNg | IL-2 | IFNg |
| Herceptin* | 15842 | 7 | 115.2 | 61.3 | 44.2 | 163107 | 267 | 162769 |
| Herceptin* | 15842 | 8 | 79.2 | 66.1 | 46.1 | 120256 | 128 | 167636 |
| Herceptin* | 15842 | 16 | 100.8 | 62.0 | 50.3 | 125690 | 157 | 163484 |
| Herceptin* | 13814 | 7 | 115.2 | 61.9 | 43.5 | 104083 | 138 | 130715 |
| Herceptin* | 13814 | 8 | 79.2 | 64.5 | 41.3 | 94188 | 194 | 154415 |
| Herceptin* | 13814 | 16 | 100.8 | 60.6 | 35.8 | 95916 | 178 | 166721 |
| | | | Spacer | A549 | H1975 | | | |
| | | | Length with | normalized | normalized | A549 | A549 | H1975 |
| Binder | Donor | Spacer | Linker (Å) | AUC | AUC | IFNg | IL-2 | IFNg |
| R12 | 2735 | 1 | 50.4 | 67.6 | 67.6 | 8935 | 4 | 15716 |
| R12 | 2735 | 15 | 43.2 | 64.0 | 63.0 | 13752 | 8 | 16921 |
| R12 | 2735 | 21 | 43.2 | 66.3 | 61.5 | 14082 | 7 | 23225 |
| R12 | 5018 | 1 | 50.4 | 80.9 | 68.8 | 4349 | 0 | 4846 |
| R12 | 5018 | 15 | 43.2 | 81.2 | 75.0 | 7613 | 9 | 4315 |
| | | | Spacer | Nalm6 | Raji | | | |
| | | | Length with | normalized | normalized | Nalm6 | Nalm6 | Raji |
| Binder | Donor | Spacer | Linker (Å) | AUC | AUC | IFNg | IL-2 | IFNg |
| R12 | 5018 | 21 | 43.2 | 85.0 | 77.4 | 5001 | 8 | 2651 |
| R11 | 7811 | 4 | 248.4 | 54.6 | 83.1 | 46161 | 26 | 15901 |
| R11 | 7811 | 5 | 205.2 | 48.8 | 69.6 | 83558 | 87 | 32411 |
| R11 | 7811 | 6 | 187.2 | 51.4 | 96.5 | 86709 | 89 | 11873 |
| R11 | 5018 | 4 | 248.4 | 59.1 | 94.5 | 37008 | 5 | 9128 |
| R11 | 5018 | 5 | 205.2 | 55.8 | 86.7 | 60935 | 10 | 17320 |
| R11 | 5018 | 6 | 187.2 | 58.4 | 114.2 | 46294 | 10 | 7174 |
| 2A2 | 2089 | 13 | 46.8 | 42.0 | 37.9 | 46579 | 1 | 67057 |
| 2A2 | 2089 | 21 | 43.2 | 38.0 | 39.4 | 55445 | 1 | 78043 |
| 2A2 | 2089 | 28 | 54 | 43.6 | 39.5 | 49905 | 1 | 78267 |
| 2A2 | 5018 | 13 | 46.8 | 61.0 | 43.2 | 38935 | 3 | 54335 |
| 2A2 | 5018 | 21 | 43.2 | 58.9 | 43.2 | 41252 | 3 | 61898 |
| 2A2 | 5018 | 28 | 54 | 61.0 | 44.3 | 34242 | 2 | 58088 |
| | | | | | Raji CD19 | Raji | | |
| | | | Spacer | | KO | CD19 | Raji | No |
| | | | Length with | | normalized | KO | CD19 | Target |
| Binder | Donor | Spacer | Linker (Å) | Raji IL-2 | AUC | IFNg | KO IL-2 | IFNg |
| FMC63 | 3868 | 9 | 79.2 | 3216 | 238307 | 4480 | 17 | 1211 |
| FMC63 | 3868 | 10 | 79.2 | 5497 | 247388 | 4745 | 12 | 1649 |
| FMC63 | 3868 | 11 | 75.6 | 3372 | 245963 | 3667 | 9 | 1853 |
| FMC63 | 4869 | 9 | 79.2 | 10092 | 223873 | 3501 | 32 | 556 |
| FMC63 | 4869 | 10 | 79.2 | 13465 | 199757 | 6382 | 41 | 2984 |
| FMC63 | 4869 | 11 | 75.6 | 9042 | 240626 | 3048 | 18 | 638 |
| | | | | | T47D Her2 | T47D | | |
| | | | | | KO | Her2 | T47D | No |
| | | | Spacer | | normalized | KO | Her2 KO | Target |
| Binder | Donor | Spacer | Length (Å) | T47D IL-2 | AUC | IFNg | IL-2 | IFNg |
| Herceptin* | 15842 | 7 | 115.2 | 857 | 509961 | 2632 | 2 | 1830 |
| Herceptin* | 15842 | 8 | 79.2 | 1525 | 563903 | 2532 | 1 | 1764 |
| Herceptin* | 15842 | 16 | 100.8 | 1147 | 713877 | 2470 | 1 | 1674 |
| Herceptin* | 13814 | 7 | 115.2 | 731 | 827793 | 1619 | 1 | 1331 |
| Herceptin* | 13814 | 8 | 79.2 | 1459 | 823493 | 1533 | 1 | 1415 |
| Herceptin* | 13814 | 16 | 100.8 | 984 | 804135 | 2581 | 0 | 2024 |
| | | | | | Raji CD19 | Raji | | |
| | | | Spacer | | KO | CD19 | Raji | No |
| | | | Length with | | normalized | KO | CD19 | Target |
| Binder | Donor | Spacer | Linker (Å) | Raji IL-2 | AUC | IFNg | KO IL-2 | IFNg |
| | | | | | A549 | A549 | | |
| | | | Spacer | | ROR1 KO | ROR1 | A549 | No |
| | | | Length with | | normalized | KO | ROR1 | Target |
| Binder | Donor | Spacer | Linker (Å) | H1975 IL-2 | AUC | IFNg | KO IL-2 | IFNg |
| R12 | 2735 | 1 | 50.4 | 10 | 283488 | 995 | 0 | 419 |
| R12 | 2735 | 15 | 43.2 | 17 | 262223 | 1353 | 3 | 415 |
| R12 | 2735 | 21 | 43.2 | 26 | 264326 | 1391 | 0 | 478 |
| R12 | 5018 | 1 | 50.4 | 0 | 275978 | 465 | 1 | 1051 |
| R12 | 5018 | 15 | 43.2 | 10 | 299606 | 1528 | 1 | 2004 |
| R12 | 5018 | 21 | 43.2 | 7 | 301079 | 1257 | 1 | 2157 |
| R11 | 7811 | 4 | 248.4 | 4 | 275413 | 3778 | 2 | 2437 |
| R11 | 7811 | 5 | 205.2 | 16 | 238046 | 6430 | 3 | 3317 |
| R11 | 7811 | 6 | 187.2 | 2 | 256889 | 5902 | 2 | 3292 |
| R11 | 5018 | 4 | 248.4 | 1 | 301271 | 3221 | 1 | 2744 |
| R11 | 5018 | 5 | 205.2 | 2 | 279139 | 5458 | 1 | 3391 |
| R11 | 5018 | 6 | 187.2 | 1 | 297120 | 5353 | 1 | 3814 |
| 2A2 | 2089 | 13 | 46.8 | 1 | 161899 | 13199 | 1 | 15196 |
| 2A2 | 2089 | 21 | 43.2 | 2 | 175504 | 16360 | 1 | 19127 |
| 2A2 | 2089 | 28 | 54 | 1 | 168503 | 19835 | 1 | 22465 |
| 2A2 | 5018 | 13 | 46.8 | 14 | 225124 | 4030 | 0 | 4824 |
| 2A2 | 5018 | 21 | 43.2 | 13 | 233789 | 5220 | 0 | 6602 |
| 2A2 | 5018 | 28 | 54 | 8 | 215509 | 5721 | 1 | 6763 |

*Her2 spacer length calculations do not include the GGGSG linker of SEQ ID NO: 4818

### Example 5

### In Vivo Anti-Tumor Activity of R12 CARs

[0764] Methods: NCI-H1975 tumor cells were implanted into mice with a take rate of 100%. Animals were randomized into treatment groups of 5 animals 11 days post tumor implantation based on tumor volume with a mean tumor size of 101.91 mm3+/−1.24 mm3. All groups received appropriate intravenous T cell treatment on day 12. Tumor measurements were collected by caliper and body weights collected by digital scale 2 times per week. Blood was collected for PK analysis via the submental region 24 hours post T cell dose, and weekly thereafter for 5 weeks total. Animals were euthanized when tumors reached 2000 mm3 in size, body weight loss exceeded 20% or were moribund.

[0765] Results: The study was successfully conducted and demonstrated that R12-1 (CAR comprising Spacer 1; SEQ ID NO: 5049) had the highest anti-tumor activity of all products tested, shown by lowest tumor volumes, extended survival, and a marked increase in peripheral CAR⁺ T cell counts (for both CD4⁺ and CD8⁺ T cells) by day 14 at both dose levels (see FIGS. 82A to 85L; PK graphs show mean+/−standard error of the mean of all animals alive at the time of sampling). R12-IgG4 (CAR with “Short” reference spacer of SEQ ID NO: 4911) was the second strongest CAR T cell product, also extending survival but without expansion of T cells in the blood. A single animal in the R12-CD8a (CAR with CD8a spacer) group had a delayed but strong anti-tumor response which coincided with strong expansion of CART cells into the blood at day 28. No other animal in that group had an anti-tumor response and thus the R12-CD8a group is considered not efficacious. R12-5 (CAR comprising Spacer 5) and R12-16 (CAR comprising Spacer 16) products did not show significant anti-tumor activity at any dose level tested. See FIG. 78A to FIG. 85L.

[0766] It is to be appreciated that the Detailed Description section, and not the Summary and Abstract sections, is intended to be used to interpret the claims. The Summary and Abstract sections may set forth one or more but not all exemplary embodiments of the present disclosure as contemplated by the inventor(s), and thus, are not intended to limit the present disclosure and the appended claims in any way.

[0767] The present disclosure has been described above with the aid of functional building blocks illustrating the implementation of specified functions and relationships thereof. The boundaries of these functional building blocks have been arbitrarily defined herein for the convenience of the description. Alternate boundaries can be defined so long as the specified functions and relationships thereof are appropriately performed.

[0768] The foregoing description of the specific embodiments will so fully reveal the general nature of the disclosure that others can, by applying knowledge within the skill of the art, readily modify and/or adapt for various applications such specific embodiments, without undue experimentation, without departing from the general concept of the present disclosure. Therefore, such adaptations and modifications are intended to be within the meaning and range of equivalents of the disclosed embodiments, based on the teaching and guidance presented herein. It is to be understood that the phraseology or terminology herein is for the purpose of description and not of limitation, such that the terminology or phraseology of the present specification is to be interpreted by the skilled artisan in light of the teachings and guidance.

[0769] The breadth and scope of the present disclosure should not be limited by any of the above-described exemplary embodiments, but should be defined only in accordance with the following claims and their equivalents.

[0770] The contents of all cited references (including literature references, patents, patent applications, and websites) that may be cited throughout this application are hereby expressly incorporated by reference in their entirety for any purpose, as are the references cited therein.

The application's sequence listing, which the Patent Office published only in electronic form, follows.

SEQUENCE LISTING (5088 sequences)

SEQ ID NO: 1 - protein, 77 aa, Artificial Sequence
  Synthetic Peptide
RWPESPKAQASSVPTAQPQAEGSLAKATTAPATTRNTGRGGEEKKKEKEKEEQEERETKTPECPSHTQPLGVYLLTP

SEQ ID NO: 2 - protein, 76 aa, Artificial Sequence
  Synthetic Peptide
WPESPKAQASSVPTAQPQAEGSLAKATTAPATTRNTGRGGEEKKKEKEKEEQEERETKTPECPSHTQPLGVYLLTP

SEQ ID NO: 3 - protein, 76 aa, Artificial Sequence
  Synthetic Peptide
RWPESPKAQASSVPTAQPQAEGSLAKATTAPATTRNTGRGGEEKKKEKEKEEQEERETKTPECPSHTQPLGVYLLT

SEQ ID NO: 4 - protein, 75 aa, Artificial Sequence
  Synthetic Peptide
PESPKAQASSVPTAQPQAEGSLAKATTAPATTRNTGRGGEEKKKEKEKEEQEERETKTPECPSHTQPLGVYLLTP

SEQ ID NO: 5 - protein, 75 aa, Artificial Sequence
  Synthetic Peptide
RWPESPKAQASSVPTAQPQAEGSLAKATTAPATTRNTGRGGEEKKKEKEKEEQEERETKTPECPSHTQPLGVYLL

SEQ ID NO: 6 - protein, 75 aa, Artificial Sequence
  Synthetic Peptide
WPESPKAQASSVPTAQPQAEGSLAKATTAPATTRNTGRGGEEKKKEKEKEEQEERETKTPECPSHTQPLGVYLLT

SEQ ID NO: 7 - protein, 74 aa, Artificial Sequence
  Synthetic Peptide
ESPKAQASSVPTAQPQAEGSLAKATTAPATTRNTGRGGEEKKKEKEKEEQEERETKTPECPSHTQPLGVYLLTP

SEQ ID NO: 8 - protein, 74 aa, Artificial Sequence
  Synthetic Peptide
PESPKAQASSVPTAQPQAEGSLAKATTAPATTRNTGRGGEEKKKEKEKEEQEERETKTPECPSHTQPLGVYLLT

SEQ ID NO: 9 - protein, 74 aa, Artificial Sequence
  Synthetic Peptide
WPESPKAQASSVPTAQPQAEGSLAKATTAPATTRNTGRGGEEKKKEKEKEEQEERETKTPECPSHTQPLGVYLL

SEQ ID NO: 10 - protein, 74 aa, Artificial Sequence
  Synthetic Peptide
RWPESPKAQASSVPTAQPQAEGSLAKATTAPATTRNTGRGGEEKKKEKEKEEQEERETKTPECPSHTQPLGVYL

SEQ ID NO: 11 - protein, 73 aa, Artificial Sequence
  Synthetic Peptide
SPKAQASSVPTAQPQAEGSLAKATTAPATTRNTGRGGEEKKKEKEKEEQEERETKTPECPSHTQPLGVYLLTP

SEQ ID NO: 12 - protein, 73 aa, Artificial Sequence
  Synthetic Peptide
ESPKAQASSVPTAQPQAEGSLAKATTAPATTRNTGRGGEEKKKEKEKEEQEERETKTPECPSHTQPLGVYLLT

SEQ ID NO: 13 - protein, 73 aa, Artificial Sequence
  Synthetic Peptide
PESPKAQASSVPTAQPQAEGSLAKATTAPATTRNTGRGGEEKKKEKEKEEQEERETKTPECPSHTQPLGVYLL

SEQ ID NO: 14 - protein, 73 aa, Artificial Sequence
  Synthetic Peptide
WPESPKAQASSVPTAQPQAEGSLAKATTAPATTRNTGRGGEEKKKEKEKEEQEERETKTPECPSHTQPLGVYL

SEQ ID NO: 15 - protein, 73 aa, Artificial Sequence
  Synthetic Peptide
RWPESPKAQASSVPTAQPQAEGSLAKATTAPATTRNTGRGGEEKKKEKEKEEQEERETKTPECPSHTQPLGVY

SEQ ID NO: 16 - protein, 72 aa, Artificial Sequence
  Synthetic Peptide
PKAQASSVPTAQPQAEGSLAKATTAPATTRNTGRGGEEKKKEKEKEEQEERETKTPECPSHTQPLGVYLLTP

SEQ ID NO: 17 - protein, 72 aa, Artificial Sequence
  Synthetic Peptide
SPKAQASSVPTAQPQAEGSLAKATTAPATTRNTGRGGEEKKKEKEKEEQEERETKTPECPSHTQPLGVYLLT

SEQ ID NO: 18 - protein, 72 aa, Artificial Sequence
  Synthetic Peptide
ESPKAQASSVPTAQPQAEGSLAKATTAPATTRNTGRGGEEKKKEKEKEEQEERETKTPECPSHTQPLGVYLL

SEQ ID NO: 19 - protein, 72 aa, Artificial Sequence
  Synthetic Peptide
PESPKAQASSVPTAQPQAEGSLAKATTAPATTRNTGRGGEEKKKEKEKEEQEERETKTPECPSHTQPLGVYL

SEQ ID NO: 20 - protein, 72 aa, Artificial Sequence
  Synthetic Peptide
WPESPKAQASSVPTAQPQAEGSLAKATTAPATTRNTGRGGEEKKKEKEKEEQEERETKTPECPSHTQPLGVY

SEQ ID NO: 21 - protein, 72 aa, Artificial Sequence
  Synthetic Peptide
RWPESPKAQASSVPTAQPQAEGSLAKATTAPATTRNTGRGGEEKKKEKEKEEQEERETKTPECPSHTQPLGV

SEQ ID NO: 22 - protein, 71 aa, Artificial Sequence
  Synthetic Peptide
KAQASSVPTAQPQAEGSLAKATTAPATTRNTGRGGEEKKKEKEKEEQEERETKTPECPSHTQPLGVYLLTP

SEQ ID NO: 23 - protein, 71 aa, Artificial Sequence
  Synthetic Peptide
PKAQASSVPTAQPQAEGSLAKATTAPATTRNTGRGGEEKKKEKEKEEQEERETKTPECPSHTQPLGVYLLT

SEQ ID NO: 24 - protein, 71 aa, Artificial Sequence
  Synthetic Peptide
SPKAQASSVPTAQPQAEGSLAKATTAPATTRNTGRGGEEKKKEKEKEEQEERETKTPECPSHTQPLGVYLL

SEQ ID NO: 25 - protein, 71 aa, Artificial Sequence
  Synthetic Peptide
ESPKAQASSVPTAQPQAEGSLAKATTAPATTRNTGRGGEEKKKEKEKEEQEERETKTPECPSHTQPLGVYL

SEQ ID NO: 26 - protein, 71 aa, Artificial Sequence
  Synthetic Peptide
PESPKAQASSVPTAQPQAEGSLAKATTAPATTRNTGRGGEEKKKEKEKEEQEERETKTPECPSHTQPLGVY

SEQ ID NO: 27 - protein, 71 aa, Artificial Sequence
  Synthetic Peptide
WPESPKAQASSVPTAQPQAEGSLAKATTAPATTRNTGRGGEEKKKEKEKEEQEERETKTPECPSHTQPLGV

SEQ ID NO: 28 - protein, 71 aa, Artificial Sequence
  Synthetic Peptide
RWPESPKAQASSVPTAQPQAEGSLAKATTAPATTRNTGRGGEEKKKEKEKEEQEERETKTPECPSHTQPLG

SEQ ID NO: 29 - protein, 70 aa, Artificial Sequence
  Synthetic Peptide
AQASSVPTAQPQAEGSLAKATTAPATTRNTGRGGEEKKKEKEKEEQEERETKTPECPSHTQPLGVYLLTP

SEQ ID NO: 30 - protein, 70 aa, Artificial Sequence
  Synthetic Peptide
KAQASSVPTAQPQAEGSLAKATTAPATTRNTGRGGEEKKKEKEKEEQEERETKTPECPSHTQPLGVYLLT

SEQ ID NO: 31 - protein, 70 aa, Artificial Sequence
  Synthetic Peptide
PKAQASSVPTAQPQAEGSLAKATTAPATTRNTGRGGEEKKKEKEKEEQEERETKTPECPSHTQPLGVYLL

SEQ ID NO: 32 - protein, 70 aa, Artificial Sequence
  Synthetic Peptide
SPKAQASSVPTAQPQAEGSLAKATTAPATTRNTGRGGEEKKKEKEKEEQEERETKTPECPSHTQPLGVYL

SEQ ID NO: 33 - protein, 70 aa, Artificial Sequence
  Synthetic Peptide
ESPKAQASSVPTAQPQAEGSLAKATTAPATTRNTGRGGEEKKKEKEKEEQEERETKTPECPSHTQPLGVY

SEQ ID NO: 34 - protein, 70 aa, Artificial Sequence
  Synthetic Peptide
PESPKAQASSVPTAQPQAEGSLAKATTAPATTRNTGRGGEEKKKEKEKEEQEERETKTPECPSHTQPLGV

SEQ ID NO: 35 - protein, 70 aa, Artificial Sequence
  Synthetic Peptide
WPESPKAQASSVPTAQPQAEGSLAKATTAPATTRNTGRGGEEKKKEKEKEEQEERETKTPECPSHTQPLG

SEQ ID NO: 36 - protein, 70 aa, Artificial Sequence
  Synthetic Peptide
RWPESPKAQASSVPTAQPQAEGSLAKATTAPATTRNTGRGGEEKKKEKEKEEQEERETKTPECPSHTQPL

SEQ ID NO: 37 - protein, 69 aa, Artificial Sequence
  Synthetic Peptide
QASSVPTAQPQAEGSLAKATTAPATTRNTGRGGEEKKKEKEKEEQEERETKTPECPSHTQPLGVYLLTP

SEQ ID NO: 38 - protein, 69 aa, Artificial Sequence
  Synthetic Peptide
AQASSVPTAQPQAEGSLAKATTAPATTRNTGRGGEEKKKEKEKEEQEERETKTPECPSHTQPLGVYLLT

SEQ ID NO: 39 - protein, 69 aa, Artificial Sequence
  Synthetic Peptide
KAQASSVPTAQPQAEGSLAKATTAPATTRNTGRGGEEKKKEKEKEEQEERETKTPECPSHTQPLGVYLL

SEQ ID NO: 40 - protein, 69 aa, Artificial Sequence
  Synthetic Peptide
PKAQASSVPTAQPQAEGSLAKATTAPATTRNTGRGGEEKKKEKEKEEQEERETKTPECPSHTQPLGVYL

SEQ ID NO: 41 - protein, 69 aa, Artificial Sequence
  Synthetic Peptide
SPKAQASSVPTAQPQAEGSLAKATTAPATTRNTGRGGEEKKKEKEKEEQEERETKTPECPSHTQPLGVY

SEQ ID NO: 42 - protein, 69 aa, Artificial Sequence
  Synthetic Peptide
ESPKAQASSVPTAQPQAEGSLAKATTAPATTRNTGRGGEEKKKEKEKEEQEERETKTPECPSHTQPLGV

SEQ ID NO: 43 - protein, 69 aa, Artificial Sequence
  Synthetic Peptide
PESPKAQASSVPTAQPQAEGSLAKATTAPATTRNTGRGGEEKKKEKEKEEQEERETKTPECPSHTQPLG

SEQ ID NO: 44 - protein, 69 aa, Artificial Sequence
  Synthetic Peptide
WPESPKAQASSVPTAQPQAEGSLAKATTAPATTRNTGRGGEEKKKEKEKEEQEERETKTPECPSHTQPL

SEQ ID NO: 45 - protein, 69 aa, Artificial Sequence
  Synthetic Peptide
RWPESPKAQASSVPTAQPQAEGSLAKATTAPATTRNTGRGGEEKKKEKEKEEQEERETKTPECPSHTQP

SEQ ID NO: 46 - protein, 68 aa, Artificial Sequence
  Synthetic Peptide
ASSVPTAQPQAEGSLAKATTAPATTRNTGRGGEEKKKEKEKEEQEERETKTPECPSHTQPLGVYLLTP

SEQ ID NO: 47 - protein, 68 aa, Artificial Sequence
  Synthetic Peptide
QASSVPTAQPQAEGSLAKATTAPATTRNTGRGGEEKKKEKEKEEQEERETKTPECPSHTQPLGVYLLT

SEQ ID NO: 48 - protein, 68 aa, Artificial Sequence
  Synthetic Peptide
AQASSVPTAQPQAEGSLAKATTAPATTRNTGRGGEEKKKEKEKEEQEERETKTPECPSHTQPLGVYLL

SEQ ID NO: 49 - protein, 68 aa, Artificial Sequence
  Synthetic Peptide
KAQASSVPTAQPQAEGSLAKATTAPATTRNTGRGGEEKKKEKEKEEQEERETKTPECPSHTQPLGVYL

SEQ ID NO: 50 - protein, 68 aa, Artificial Sequence
  Synthetic Peptide
PKAQASSVPTAQPQAEGSLAKATTAPATTRNTGRGGEEKKKEKEKEEQEERETKTPECPSHTQPLGVY

SEQ ID NO: 51 - protein, 68 aa, Artificial Sequence
  Synthetic Peptide
SPKAQASSVPTAQPQAEGSLAKATTAPATTRNTGRGGEEKKKEKEKEEQEERETKTPECPSHTQPLGV

SEQ ID NO: 52 - protein, 68 aa, Artificial Sequence
  Synthetic Peptide
ESPKAQASSVPTAQPQAEGSLAKATTAPATTRNTGRGGEEKKKEKEKEEQEERETKTPECPSHTQPLG

SEQ ID NO: 53 - protein, 68 aa, Artificial Sequence
  Synthetic Peptide
PESPKAQASSVPTAQPQAEGSLAKATTAPATTRNTGRGGEEKKKEKEKEEQEERETKTPECPSHTQPL

SEQ ID NO: 54 - protein, 68 aa, Artificial Sequence
  Synthetic Peptide
WPESPKAQASSVPTAQPQAEGSLAKATTAPATTRNTGRGGEEKKKEKEKEEQEERETKTPECPSHTQP

SEQ ID NO: 55 - protein, 68 aa, Artificial Sequence
  Synthetic Peptide
RWPESPKAQASSVPTAQPQAEGSLAKATTAPATTRNTGRGGEEKKKEKEKEEQEERETKTPECPSHTQ

SEQ ID NO: 56 - protein, 67 aa, Artificial Sequence
  Synthetic Peptide
SSVPTAQPQAEGSLAKATTAPATTRNTGRGGEEKKKEKEKEEQEERETKTPECPSHTQPLGVYLLTP

SEQ ID NO: 57 - protein, 67 aa, Artificial Sequence
  Synthetic Peptide
ASSVPTAQPQAEGSLAKATTAPATTRNTGRGGEEKKKEKEKEEQEERETKTPECPSHTQPLGVYLLT

SEQ ID NO: 58 - protein, 67 aa, Artificial Sequence
  Synthetic Peptide
QASSVPTAQPQAEGSLAKATTAPATTRNTGRGGEEKKKEKEKEEQEERETKTPECPSHTQPLGVYLL

SEQ ID NO: 59 - protein, 67 aa, Artificial Sequence
  Synthetic Peptide
AQASSVPTAQPQAEGSLAKATTAPATTRNTGRGGEEKKKEKEKEEQEERETKTPECPSHTQPLGVYL

SEQ ID NO: 60 - protein, 67 aa, Artificial Sequence
  Synthetic Peptide
KAQASSVPTAQPQAEGSLAKATTAPATTRNTGRGGEEKKKEKEKEEQEERETKTPECPSHTQPLGVY

SEQ ID NO: 61 - protein, 67 aa, Artificial Sequence
  Synthetic Peptide
PKAQASSVPTAQPQAEGSLAKATTAPATTRNTGRGGEEKKKEKEKEEQEERETKTPECPSHTQPLGV

SEQ ID NO: 62 - protein, 67 aa, Artificial Sequence
  Synthetic Peptide
SPKAQASSVPTAQPQAEGSLAKATTAPATTRNTGRGGEEKKKEKEKEEQEERETKTPECPSHTQPLG

SEQ ID NO: 63 - protein, 67 aa, Artificial Sequence
  Synthetic Peptide
ESPKAQASSVPTAQPQAEGSLAKATTAPATTRNTGRGGEEKKKEKEKEEQEERETKTPECPSHTQPL

SEQ ID NO: 64 - protein, 67 aa, Artificial Sequence
  Synthetic Peptide
PESPKAQASSVPTAQPQAEGSLAKATTAPATTRNTGRGGEEKKKEKEKEEQEERETKTPECPSHTQP

SEQ ID NO: 65 - protein, 67 aa, Artificial Sequence
  Synthetic Peptide
WPESPKAQASSVPTAQPQAEGSLAKATTAPATTRNTGRGGEEKKKEKEKEEQEERETKTPECPSHTQ

SEQ ID NO: 66 - protein, 67 aa, Artificial Sequence
  Synthetic Peptide
RWPESPKAQASSVPTAQPQAEGSLAKATTAPATTRNTGRGGEEKKKEKEKEEQEERETKTPECPSHT

SEQ ID NO: 67 - protein, 66 aa, Artificial Sequence
  Synthetic Peptide
SVPTAQPQAEGSLAKATTAPATTRNTGRGGEEKKKEKEKEEQEERETKTPECPSHTQPLGVYLLTP

SEQ ID NO: 68 - protein, 66 aa, Artificial Sequence
  Synthetic Peptide
SSVPTAQPQAEGSLAKATTAPATTRNTGRGGEEKKKEKEKEEQEERETKTPECPSHTQPLGVYLLT

SEQ ID NO: 69 - protein, 66 aa, Artificial Sequence
  Synthetic Peptide
ASSVPTAQPQAEGSLAKATTAPATTRNTGRGGEEKKKEKEKEEQEERETKTPECPSHTQPLGVYLL

SEQ ID NO: 70 - protein, 66 aa, Artificial Sequence
  Synthetic Peptide
QASSVPTAQPQAEGSLAKATTAPATTRNTGRGGEEKKKEKEKEEQEERETKTPECPSHTQPLGVYL

SEQ ID NO: 71 - protein, 66 aa, Artificial Sequence
  Synthetic Peptide
AQASSVPTAQPQAEGSLAKATTAPATTRNTGRGGEEKKKEKEKEEQEERETKTPECPSHTQPLGVY

SEQ ID NO: 72 - protein, 66 aa, Artificial Sequence
  Synthetic Peptide
KAQASSVPTAQPQAEGSLAKATTAPATTRNTGRGGEEKKKEKEKEEQEERETKTPECPSHTQPLGV

SEQ ID NO: 73 - protein, 66 aa, Artificial Sequence
  Synthetic Peptide
PKAQASSVPTAQPQAEGSLAKATTAPATTRNTGRGGEEKKKEKEKEEQEERETKTPECPSHTQPLG

SEQ ID NO: 74 - protein, 66 aa, Artificial Sequence
  Synthetic Peptide
SPKAQASSVPTAQPQAEGSLAKATTAPATTRNTGRGGEEKKKEKEKEEQEERETKTPECPSHTQPL

SEQ ID NO: 75 - protein, 66 aa, Artificial Sequence
  Synthetic Peptide
ESPKAQASSVPTAQPQAEGSLAKATTAPATTRNTGRGGEEKKKEKEKEEQEERETKTPECPSHTQP

SEQ ID NO: 76 - protein, 66 aa, Artificial Sequence
  Synthetic Peptide
PESPKAQASSVPTAQPQAEGSLAKATTAPATTRNTGRGGEEKKKEKEKEEQEERETKTPECPSHTQ

SEQ ID NO: 77 - protein, 66 aa, Artificial Sequence
  Synthetic Peptide
WPESPKAQASSVPTAQPQAEGSLAKATTAPATTRNTGRGGEEKKKEKEKEEQEERETKTPECPSHT

SEQ ID NO: 78 - protein, 66 aa, Artificial Sequence
  Synthetic Peptide
RWPESPKAQASSVPTAQPQAEGSLAKATTAPATTRNTGRGGEEKKKEKEKEEQEERETKTPECPSH

SEQ ID NO: 79 - protein, 65 aa, Artificial Sequence
  Synthetic Peptide
VPTAQPQAEGSLAKATTAPATTRNTGRGGEEKKKEKEKEEQEERETKTPECPSHTQPLGVYLLTP

SEQ ID NO: 80 - protein, 65 aa, Artificial Sequence
  Synthetic Peptide
SVPTAQPQAEGSLAKATTAPATTRNTGRGGEEKKKEKEKEEQEERETKTPECPSHTQPLGVYLLT

SEQ ID NO: 81 - protein, 65 aa, Artificial Sequence
  Synthetic Peptide
SSVPTAQPQAEGSLAKATTAPATTRNTGRGGEEKKKEKEKEEQEERETKTPECPSHTQPLGVYLL

SEQ ID NO: 82 - protein, 65 aa, Artificial Sequence
  Synthetic Peptide
ASSVPTAQPQAEGSLAKATTAPATTRNTGRGGEEKKKEKEKEEQEERETKTPECPSHTQPLGVYL

SEQ ID NO: 83 - protein, 65 aa, Artificial Sequence
  Synthetic Peptide
QASSVPTAQPQAEGSLAKATTAPATTRNTGRGGEEKKKEKEKEEQEERETKTPECPSHTQPLGVY

SEQ ID NO: 84 - protein, 65 aa, Artificial Sequence
  Synthetic Peptide
AQASSVPTAQPQAEGSLAKATTAPATTRNTGRGGEEKKKEKEKEEQEERETKTPECPSHTQPLGV

SEQ ID NO: 85 - protein, 65 aa, Artificial Sequence
  Synthetic Peptide
KAQASSVPTAQPQAEGSLAKATTAPATTRNTGRGGEEKKKEKEKEEQEERETKTPECPSHTQPLG

SEQ ID NO: 86 - protein, 65 aa, Artificial Sequence
  Synthetic Peptide
PKAQASSVPTAQPQAEGSLAKATTAPATTRNTGRGGEEKKKEKEKEEQEERETKTPECPSHTQPL

SEQ ID NO: 87 - protein, 65 aa, Artificial Sequence
  Synthetic Peptide
SPKAQASSVPTAQPQAEGSLAKATTAPATTRNTGRGGEEKKKEKEKEEQEERETKTPECPSHTQP

SEQ ID NO: 88 - protein, 65 aa, Artificial Sequence
  Synthetic Peptide
ESPKAQASSVPTAQPQAEGSLAKATTAPATTRNTGRGGEEKKKEKEKEEQEERETKTPECPSHTQ

SEQ ID NO: 89 - protein, 65 aa, Artificial Sequence
  Synthetic Peptide
PESPKAQASSVPTAQPQAEGSLAKATTAPATTRNTGRGGEEKKKEKEKEEQEERETKTPECPSHT

SEQ ID NO: 90 - protein, 65 aa, Artificial Sequence
  Synthetic Peptide
WPESPKAQASSVPTAQPQAEGSLAKATTAPATTRNTGRGGEEKKKEKEKEEQEERETKTPECPSH

SEQ ID NO: 91 - protein, 65 aa, Artificial Sequence
  Synthetic Peptide
RWPESPKAQASSVPTAQPQAEGSLAKATTAPATTRNTGRGGEEKKKEKEKEEQEERETKTPECPS

SEQ ID NO: 92 - protein, 64 aa, Artificial Sequence
  Synthetic Peptide
PTAQPQAEGSLAKATTAPATTRNTGRGGEEKKKEKEKEEQEERETKTPECPSHTQPLGVYLLTP

SEQ ID NO: 93 - protein, 64 aa, Artificial Sequence
  Synthetic Peptide
VPTAQPQAEGSLAKATTAPATTRNTGRGGEEKKKEKEKEEQEERETKTPECPSHTQPLGVYLLT

SEQ ID NO: 94 - protein, 64 aa, Artificial Sequence
  Synthetic Peptide
SVPTAQPQAEGSLAKATTAPATTRNTGRGGEEKKKEKEKEEQEERETKTPECPSHTQPLGVYLL

SEQ ID NO: 95 - protein, 64 aa, Artificial Sequence
  Synthetic Peptide
SSVPTAQPQAEGSLAKATTAPATTRNTGRGGEEKKKEKEKEEQEERETKTPECPSHTQPLGVYL

SEQ ID NO: 96 - protein, 64 aa, Artificial Sequence
  Synthetic Peptide
ASSVPTAQPQAEGSLAKATTAPATTRNTGRGGEEKKKEKEKEEQEERETKTPECPSHTQPLGVY

SEQ ID NO: 97 - protein, 64 aa, Artificial Sequence
  Synthetic Peptide
QASSVPTAQPQAEGSLAKATTAPATTRNTGRGGEEKKKEKEKEEQEERETKTPECPSHTQPLGV

SEQ ID NO: 98 - protein, 64 aa, Artificial Sequence
  Synthetic Peptide
AQASSVPTAQPQAEGSLAKATTAPATTRNTGRGGEEKKKEKEKEEQEERETKTPECPSHTQPLG

SEQ ID NO: 99 - protein, 64 aa, Artificial Sequence
  Synthetic Peptide
KAQASSVPTAQPQAEGSLAKATTAPATTRNTGRGGEEKKKEKEKEEQEERETKTPECPSHTQPL

SEQ ID NO: 100 - protein, 64 aa, Artificial Sequence
  Synthetic Peptide
PKAQASSVPTAQPQAEGSLAKATTAPATTRNTGRGGEEKKKEKEKEEQEERETKTPECPSHTQP

SEQ ID NO: 101 - protein, 64 aa, Artificial Sequence
  Synthetic Peptide
SPKAQASSVPTAQPQAEGSLAKATTAPATTRNTGRGGEEKKKEKEKEEQEERETKTPECPSHTQ

SEQ ID NO: 102 - protein, 64 aa, Artificial Sequence
  Synthetic Peptide
ESPKAQASSVPTAQPQAEGSLAKATTAPATTRNTGRGGEEKKKEKEKEEQEERETKTPECPSHT

SEQ ID NO: 103 - protein, 64 aa, Artificial Sequence
  Synthetic Peptide
PESPKAQASSVPTAQPQAEGSLAKATTAPATTRNTGRGGEEKKKEKEKEEQEERETKTPECPSH

SEQ ID NO: 104 - protein, 64 aa, Artificial Sequence
  Synthetic Peptide
WPESPKAQASSVPTAQPQAEGSLAKATTAPATTRNTGRGGEEKKKEKEKEEQEERETKTPECPS

SEQ ID NO: 105 - protein, 64 aa, Artificial Sequence
  Synthetic Peptide
RWPESPKAQASSVPTAQPQAEGSLAKATTAPATTRNTGRGGEEKKKEKEKEEQEERETKTPECP

SEQ ID NO: 106 - protein, 63 aa, Artificial Sequence
  Synthetic Peptide
TAQPQAEGSLAKATTAPATTRNTGRGGEEKKKEKEKEEQEERETKTPECPSHTQPLGVYLLTP

SEQ ID NO: 107 - protein, 63 aa, Artificial Sequence
  Synthetic Peptide
PTAQPQAEGSLAKATTAPATTRNTGRGGEEKKKEKEKEEQEERETKTPECPSHTQPLGVYLLT

SEQ ID NO: 108 - protein, 63 aa, Artificial Sequence
  Synthetic Peptide
VPTAQPQAEGSLAKATTAPATTRNTGRGGEEKKKEKEKEEQEERETKTPECPSHTQPLGVYLL

SEQ ID NO: 109 - protein, 63 aa, Artificial Sequence
  Synthetic Peptide
SVPTAQPQAEGSLAKATTAPATTRNTGRGGEEKKKEKEKEEQEERETKTPECPSHTQPLGVYL

SEQ ID NO: 110 - protein, 63 aa, Artificial Sequence
  Synthetic Peptide
SSVPTAQPQAEGSLAKATTAPATTRNTGRGGEEKKKEKEKEEQEERETKTPECPSHTQPLGVY

SEQ ID NO: 111 - protein, 63 aa, Artificial Sequence
  Synthetic Peptide
ASSVPTAQPQAEGSLAKATTAPATTRNTGRGGEEKKKEKEKEEQEERETKTPECPSHTQPLGV

SEQ ID NO: 112 - protein, 63 aa, Artificial Sequence
  Synthetic Peptide
QASSVPTAQPQAEGSLAKATTAPATTRNTGRGGEEKKKEKEKEEQEERETKTPECPSHTQPLG

SEQ ID NO: 113 - protein, 63 aa, Artificial Sequence
  Synthetic Peptide
AQASSVPTAQPQAEGSLAKATTAPATTRNTGRGGEEKKKEKEKEEQEERETKTPECPSHTQPL

SEQ ID NO: 114 - protein, 63 aa, Artificial Sequence
  Synthetic Peptide
KAQASSVPTAQPQAEGSLAKATTAPATTRNTGRGGEEKKKEKEKEEQEERETKTPECPSHTQP

SEQ ID NO: 115 - protein, 63 aa, Artificial Sequence
  Synthetic Peptide
PKAQASSVPTAQPQAEGSLAKATTAPATTRNTGRGGEEKKKEKEKEEQEERETKTPECPSHTQ

SEQ ID NO: 116 - protein, 63 aa, Artificial Sequence
  Synthetic Peptide
SPKAQASSVPTAQPQAEGSLAKATTAPATTRNTGRGGEEKKKEKEKEEQEERETKTPECPSHT

SEQ ID NO: 117 - protein, 63 aa, Artificial Sequence
  Synthetic Peptide
ESPKAQASSVPTAQPQAEGSLAKATTAPATTRNTGRGGEEKKKEKEKEEQEERETKTPECPSH

SEQ ID NO: 118 - protein, 63 aa, Artificial Sequence
  Synthetic Peptide
PESPKAQASSVPTAQPQAEGSLAKATTAPATTRNTGRGGEEKKKEKEKEEQEERETKTPECPS

SEQ ID NO: 119 - protein, 63 aa, Artificial Sequence
  Synthetic Peptide
WPESPKAQASSVPTAQPQAEGSLAKATTAPATTRNTGRGGEEKKKEKEKEEQEERETKTPECP

SEQ ID NO: 120 - protein, 63 aa, Artificial Sequence
  Synthetic Peptide
RWPESPKAQASSVPTAQPQAEGSLAKATTAPATTRNTGRGGEEKKKEKEKEEQEERETKTPEC

SEQ ID NO: 121 - protein, 62 aa, Artificial Sequence
  Synthetic Peptide
AQPQAEGSLAKATTAPATTRNTGRGGEEKKKEKEKEEQEERETKTPECPSHTQPLGVYLLTP

SEQ ID NO: 122 - protein, 62 aa, Artificial Sequence
  Synthetic Peptide
TAQPQAEGSLAKATTAPATTRNTGRGGEEKKKEKEKEEQEERETKTPECPSHTQPLGVYLLT

SEQ ID NO: 123 - protein, 62 aa, Artificial Sequence
  Synthetic Peptide
PTAQPQAEGSLAKATTAPATTRNTGRGGEEKKKEKEKEEQEERETKTPECPSHTQPLGVYLL

SEQ ID NO: 124 - protein, 62 aa, Artificial Sequence
  Synthetic Peptide
VPTAQPQAEGSLAKATTAPATTRNTGRGGEEKKKEKEKEEQEERETKTPECPSHTQPLGVYL

SEQ ID NO: 125 - protein, 62 aa, Artificial Sequence
  Synthetic Peptide
SVPTAQPQAEGSLAKATTAPATTRNTGRGGEEKKKEKEKEEQEERETKTPECPSHTQPLGVY

SEQ ID NO: 126 - protein, 62 aa, Artificial Sequence
  Synthetic Peptide
SSVPTAQPQAEGSLAKATTAPATTRNTGRGGEEKKKEKEKEEQEERETKTPECPSHTQPLGV

SEQ ID NO: 127 - protein, 62 aa, Artificial Sequence
  Synthetic Peptide
ASSVPTAQPQAEGSLAKATTAPATTRNTGRGGEEKKKEKEKEEQEERETKTPECPSHTQPLG

SEQ ID NO: 128 - protein, 62 aa, Artificial Sequence
  Synthetic Peptide
QASSVPTAQPQAEGSLAKATTAPATTRNTGRGGEEKKKEKEKEEQEERETKTPECPSHTQPL

SEQ ID NO: 129 - protein, 62 aa, Artificial Sequence
  Synthetic Peptide
AQASSVPTAQPQAEGSLAKATTAPATTRNTGRGGEEKKKEKEKEEQEERETKTPECPSHTQP

SEQ ID NO: 130 - protein, 62 aa, Artificial Sequence
  Synthetic Peptide
KAQASSVPTAQPQAEGSLAKATTAPATTRNTGRGGEEKKKEKEKEEQEERETKTPECPSHTQ

SEQ ID NO: 131 - protein, 62 aa, Artificial Sequence
  Synthetic Peptide
PKAQASSVPTAQPQAEGSLAKATTAPATTRNTGRGGEEKKKEKEKEEQEERETKTPECPSHT

SEQ ID NO: 132 - protein, 62 aa, Artificial Sequence
  Synthetic Peptide
SPKAQASSVPTAQPQAEGSLAKATTAPATTRNTGRGGEEKKKEKEKEEQEERETKTPECPSH

SEQ ID NO: 133 - protein, 62 aa, Artificial Sequence
  Synthetic Peptide
ESPKAQASSVPTAQPQAEGSLAKATTAPATTRNTGRGGEEKKKEKEKEEQEERETKTPECPS

SEQ ID NO: 134 - protein, 62 aa, Artificial Sequence
  Synthetic Peptide
PESPKAQASSVPTAQPQAEGSLAKATTAPATTRNTGRGGEEKKKEKEKEEQEERETKTPECP

SEQ ID NO: 135 - protein, 62 aa, Artificial Sequence
  Synthetic Peptide
WPESPKAQASSVPTAQPQAEGSLAKATTAPATTRNTGRGGEEKKKEKEKEEQEERETKTPEC

SEQ ID NO: 136 - protein, 62 aa, Artificial Sequence
  Synthetic Peptide
RWPESPKAQASSVPTAQPQAEGSLAKATTAPATTRNTGRGGEEKKKEKEKEEQEERETKTPE

SEQ ID NO: 137 - protein, 61 aa, Artificial Sequence
  Synthetic Peptide
QPQAEGSLAKATTAPATTRNTGRGGEEKKKEKEKEEQEERETKTPECPSHTQPLGVYLLTP

SEQ ID NO: 138 - protein, 61 aa, Artificial Sequence
  Synthetic Peptide
AQPQAEGSLAKATTAPATTRNTGRGGEEKKKEKEKEEQEERETKTPECPSHTQPLGVYLLT

SEQ ID NO: 139 - protein, 61 aa, Artificial Sequence
  Synthetic Peptide
TAQPQAEGSLAKATTAPATTRNTGRGGEEKKKEKEKEEQEERETKTPECPSHTQPLGVYLL

SEQ ID NO: 140 - protein, 61 aa, Artificial Sequence
  Synthetic Peptide
PTAQPQAEGSLAKATTAPATTRNTGRGGEEKKKEKEKEEQEERETKTPECPSHTQPLGVYL

SEQ ID NO: 141 - protein, 61 aa, Artificial Sequence
  Synthetic Peptide
VPTAQPQAEGSLAKATTAPATTRNTGRGGEEKKKEKEKEEQEERETKTPECPSHTQPLGVY

SEQ ID NO: 142 - protein, 61 aa, Artificial Sequence
  Synthetic Peptide
SVPTAQPQAEGSLAKATTAPATTRNTGRGGEEKKKEKEKEEQEERETKTPECPSHTQPLGV

SEQ ID NO: 143 - protein, 61 aa, Artificial Sequence
  Synthetic Peptide
SSVPTAQPQAEGSLAKATTAPATTRNTGRGGEEKKKEKEKEEQEERETKTPECPSHTQPLG

SEQ ID NO: 144 - protein, 61 aa, Artificial Sequence
  Synthetic Peptide
ASSVPTAQPQAEGSLAKATTAPATTRNTGRGGEEKKKEKEKEEQEERETKTPECPSHTQPL

SEQ ID NO: 145 - protein, 61 aa, Artificial Sequence
  Synthetic Peptide
QASSVPTAQPQAEGSLAKATTAPATTRNTGRGGEEKKKEKEKEEQEERETKTPECPSHTQP

SEQ ID NO: 146 - protein, 61 aa, Artificial Sequence
  Synthetic Peptide
AQASSVPTAQPQAEGSLAKATTAPATTRNTGRGGEEKKKEKEKEEQEERETKTPECPSHTQ

SEQ ID NO: 147 - protein, 61 aa, Artificial Sequence
  Synthetic Peptide
KAQASSVPTAQPQAEGSLAKATTAPATTRNTGRGGEEKKKEKEKEEQEERETKTPECPSHT

SEQ ID NO: 148 - protein, 61 aa, Artificial Sequence
  Synthetic Peptide
PKAQASSVPTAQPQAEGSLAKATTAPATTRNTGRGGEEKKKEKEKEEQEERETKTPECPSH

SEQ ID NO: 149 - protein, 61 aa, Artificial Sequence
  Synthetic Peptide
SPKAQASSVPTAQPQAEGSLAKATTAPATTRNTGRGGEEKKKEKEKEEQEERETKTPECPS

SEQ ID NO: 150 - protein, 61 aa, Artificial Sequence
  Synthetic Peptide
ESPKAQASSVPTAQPQAEGSLAKATTAPATTRNTGRGGEEKKKEKEKEEQEERETKTPECP

SEQ ID NO: 151 - protein, 61 aa, Artificial Sequence
  Synthetic Peptide
PESPKAQASSVPTAQPQAEGSLAKATTAPATTRNTGRGGEEKKKEKEKEEQEERETKTPEC

SEQ ID NO: 152 - protein, 61 aa, Artificial Sequence
  Synthetic Peptide
WPESPKAQASSVPTAQPQAEGSLAKATTAPATTRNTGRGGEEKKKEKEKEEQEERETKTPE

SEQ ID NO: 153 - protein, 61 aa, Artificial Sequence
  Synthetic Peptide
RWPESPKAQASSVPTAQPQAEGSLAKATTAPATTRNTGRGGEEKKKEKEKEEQEERETKTP

SEQ ID NO: 154 - protein, 60 aa, Artificial Sequence
  Synthetic Peptide
PQAEGSLAKATTAPATTRNTGRGGEEKKKEKEKEEQEERETKTPECPSHTQPLGVYLLTP

SEQ ID NO: 155 - protein, 60 aa, Artificial Sequence
  Synthetic Peptide
QPQAEGSLAKATTAPATTRNTGRGGEEKKKEKEKEEQEERETKTPECPSHTQPLGVYLLT

SEQ ID NO: 156 - protein, 60 aa, Artificial Sequence
  Synthetic Peptide
AQPQAEGSLAKATTAPATTRNTGRGGEEKKKEKEKEEQEERETKTPECPSHTQPLGVYLL

SEQ ID NO: 157 - protein, 60 aa, Artificial Sequence
  Synthetic Peptide
TAQPQAEGSLAKATTAPATTRNTGRGGEEKKKEKEKEEQEERETKTPECPSHTQPLGVYL

SEQ ID NO: 158 - protein, 60 aa, Artificial Sequence
  Synthetic Peptide
PTAQPQAEGSLAKATTAPATTRNTGRGGEEKKKEKEKEEQEERETKTPECPSHTQPLGVY

SEQ ID NO: 159 - protein, 60 aa, Artificial Sequence
  Synthetic Peptide
VPTAQPQAEGSLAKATTAPATTRNTGRGGEEKKKEKEKEEQEERETKTPECPSHTQPLGV

SEQ ID NO: 160 - protein, 60 aa, Artificial Sequence
  Synthetic Peptide
SVPTAQPQAEGSLAKATTAPATTRNTGRGGEEKKKEKEKEEQEERETKTPECPSHTQPLG

SEQ ID NO: 161 - protein, 60 aa, Artificial Sequence
  Synthetic Peptide
SSVPTAQPQAEGSLAKATTAPATTRNTGRGGEEKKKEKEKEEQEERETKTPECPSHTQPL

SEQ ID NO: 162 - protein, 60 aa, Artificial Sequence
  Synthetic Peptide
ASSVPTAQPQAEGSLAKATTAPATTRNTGRGGEEKKKEKEKEEQEERETKTPECPSHTQP

SEQ ID NO: 163 - protein, 60 aa, Artificial Sequence
  Synthetic Peptide
QASSVPTAQPQAEGSLAKATTAPATTRNTGRGGEEKKKEKEKEEQEERETKTPECPSHTQ

SEQ ID NO: 164 - protein, 60 aa, Artificial Sequence
  Synthetic Peptide
AQASSVPTAQPQAEGSLAKATTAPATTRNTGRGGEEKKKEKEKEEQEERETKTPECPSHT

SEQ ID NO: 165 - protein, 60 aa, Artificial Sequence
  Synthetic Peptide
KAQASSVPTAQPQAEGSLAKATTAPATTRNTGRGGEEKKKEKEKEEQEERETKTPECPSH

SEQ ID NO: 166 - protein, 60 aa, Artificial Sequence
  Synthetic Peptide
PKAQASSVPTAQPQAEGSLAKATTAPATTRNTGRGGEEKKKEKEKEEQEERETKTPECPS

SEQ ID NO: 167 - protein, 60 aa, Artificial Sequence
  Synthetic Peptide
SPKAQASSVPTAQPQAEGSLAKATTAPATTRNTGRGGEEKKKEKEKEEQEERETKTPECP

SEQ ID NO: 168 - protein, 60 aa, Artificial Sequence
  Synthetic Peptide
ESPKAQASSVPTAQPQAEGSLAKATTAPATTRNTGRGGEEKKKEKEKEEQEERETKTPEC

SEQ ID NO: 169 - protein, 60 aa, Artificial Sequence
  Synthetic Peptide
PESPKAQASSVPTAQPQAEGSLAKATTAPATTRNTGRGGEEKKKEKEKEEQEERETKTPE

SEQ ID NO: 170 - protein, 60 aa, Artificial Sequence
  Synthetic Peptide
WPESPKAQASSVPTAQPQAEGSLAKATTAPATTRNTGRGGEEKKKEKEKEEQEERETKTP

SEQ ID NO: 171 - protein, 60 aa, Artificial Sequence
  Synthetic Peptide
RWPESPKAQASSVPTAQPQAEGSLAKATTAPATTRNTGRGGEEKKKEKEKEEQEERETKT

SEQ ID NO: 172 - protein, 59 aa, Artificial Sequence
  Synthetic Peptide
QAEGSLAKATTAPATTRNTGRGGEEKKKEKEKEEQEERETKTPECPSHTQPLGVYLLTP

SEQ ID NO: 173 - protein, 59 aa, Artificial Sequence
  Synthetic Peptide
PQAEGSLAKATTAPATTRNTGRGGEEKKKEKEKEEQEERETKTPECPSHTQPLGVYLLT

SEQ ID NO: 174 - protein, 59 aa, Artificial Sequence
  Synthetic Peptide
QPQAEGSLAKATTAPATTRNTGRGGEEKKKEKEKEEQEERETKTPECPSHTQPLGVYLL

SEQ ID NO: 175 - protein, 59 aa, Artificial Sequence
  Synthetic Peptide
AQPQAEGSLAKATTAPATTRNTGRGGEEKKKEKEKEEQEERETKTPECPSHTQPLGVYL

SEQ ID NO: 176 - protein, 59 aa, Artificial Sequence
  Synthetic Peptide
TAQPQAEGSLAKATTAPATTRNTGRGGEEKKKEKEKEEQEERETKTPECPSHTQPLGVY

SEQ ID NO: 177 - protein, 59 aa, Artificial Sequence
  Synthetic Peptide
PTAQPQAEGSLAKATTAPATTRNTGRGGEEKKKEKEKEEQEERETKTPECPSHTQPLGV

SEQ ID NO: 178 - protein, 59 aa, Artificial Sequence
  Synthetic Peptide
VPTAQPQAEGSLAKATTAPATTRNTGRGGEEKKKEKEKEEQEERETKTPECPSHTQPLG

SEQ ID NO: 179 - protein, 59 aa, Artificial Sequence
  Synthetic Peptide
SVPTAQPQAEGSLAKATTAPATTRNTGRGGEEKKKEKEKEEQEERETKTPECPSHTQPL

SEQ ID NO: 180 - protein, 59 aa, Artificial Sequence
  Synthetic Peptide
SSVPTAQPQAEGSLAKATTAPATTRNTGRGGEEKKKEKEKEEQEERETKTPECPSHTQP

SEQ ID NO: 181 - protein, 59 aa, Artificial Sequence
  Synthetic Peptide
ASSVPTAQPQAEGSLAKATTAPATTRNTGRGGEEKKKEKEKEEQEERETKTPECPSHTQ

SEQ ID NO: 182 - protein, 59 aa, Artificial Sequence
  Synthetic Peptide
QASSVPTAQPQAEGSLAKATTAPATTRNTGRGGEEKKKEKEKEEQEERETKTPECPSHT

SEQ ID NO: 183 - protein, 59 aa, Artificial Sequence
  Synthetic Peptide
AQASSVPTAQPQAEGSLAKATTAPATTRNTGRGGEEKKKEKEKEEQEERETKTPECPSH

SEQ ID NO: 184 - protein, 59 aa, Artificial Sequence
  Synthetic Peptide
KAQASSVPTAQPQAEGSLAKATTAPATTRNTGRGGEEKKKEKEKEEQEERETKTPECPS

SEQ ID NO: 185 - protein, 59 aa, Artificial Sequence
  Synthetic Peptide
PKAQASSVPTAQPQAEGSLAKATTAPATTRNTGRGGEEKKKEKEKEEQEERETKTPECP

SEQ ID NO: 186 - protein, 59 aa, Artificial Sequence
  Synthetic Peptide
SPKAQASSVPTAQPQAEGSLAKATTAPATTRNTGRGGEEKKKEKEKEEQEERETKTPEC

SEQ ID NO: 187 - protein, 59 aa, Artificial Sequence
  Synthetic Peptide
ESPKAQASSVPTAQPQAEGSLAKATTAPATTRNTGRGGEEKKKEKEKEEQEERETKTPE

SEQ ID NO: 188 - protein, 59 aa, Artificial Sequence
  Synthetic Peptide
PESPKAQASSVPTAQPQAEGSLAKATTAPATTRNTGRGGEEKKKEKEKEEQEERETKTP

SEQ ID NO: 189 - protein, 59 aa, Artificial Sequence
  Synthetic Peptide
RWPESPKAQASSVPTAQPQAEGSLAKATTAPATTRNTGRGGEEKKKEKEKEEQEERETK

SEQ ID NO: 190 - protein, 59 aa, Artificial Sequence
  Synthetic Peptide
WPESPKAQASSVPTAQPQAEGSLAKATTAPATTRNTGRGGEEKKKEKEKEEQEERETKT

SEQ ID NO: 191 - protein, 58 aa, Artificial Sequence
  Synthetic Peptide
AEGSLAKATTAPATTRNTGRGGEEKKKEKEKEEQEERETKTPECPSHTQPLGVYLLTP

SEQ ID NO: 192 - protein, 58 aa, Artificial Sequence
  Synthetic Peptide
QAEGSLAKATTAPATTRNTGRGGEEKKKEKEKEEQEERETKTPECPSHTQPLGVYLLT

SEQ ID NO: 193 - protein, 58 aa, Artificial Sequence
  Synthetic Peptide
PQAEGSLAKATTAPATTRNTGRGGEEKKKEKEKEEQEERETKTPECPSHTQPLGVYLL

SEQ ID NO: 194 - protein, 58 aa, Artificial Sequence
  Synthetic Peptide
QPQAEGSLAKATTAPATTRNTGRGGEEKKKEKEKEEQEERETKTPECPSHTQPLGVYL

SEQ ID NO: 195 - protein, 58 aa, Artificial Sequence
  Synthetic Peptide
AQPQAEGSLAKATTAPATTRNTGRGGEEKKKEKEKEEQEERETKTPECPSHTQPLGVY

SEQ ID NO: 196 - protein, 58 aa, Artificial Sequence
  Synthetic Peptide
TAQPQAEGSLAKATTAPATTRNTGRGGEEKKKEKEKEEQEERETKTPECPSHTQPLGV

SEQ ID NO: 197 - protein, 58 aa, Artificial Sequence
  Synthetic Peptide
PTAQPQAEGSLAKATTAPATTRNTGRGGEEKKKEKEKEEQEERETKTPECPSHTQPLG

SEQ ID NO: 198 - protein, 58 aa, Artificial Sequence
  Synthetic Peptide
VPTAQPQAEGSLAKATTAPATTRNTGRGGEEKKKEKEKEEQEERETKTPECPSHTQPL

SEQ ID NO: 199 - protein, 58 aa, Artificial Sequence
  Synthetic Peptide
SVPTAQPQAEGSLAKATTAPATTRNTGRGGEEKKKEKEKEEQEERETKTPECPSHTQP

SEQ ID NO: 200 - protein, 58 aa, Artificial Sequence
  Synthetic Peptide
SSVPTAQPQAEGSLAKATTAPATTRNTGRGGEEKKKEKEKEEQEERETKTPECPSHTQ

SEQ ID NO: 201 - protein, 58 aa, Artificial Sequence
  Synthetic Peptide
ASSVPTAQPQAEGSLAKATTAPATTRNTGRGGEEKKKEKEKEEQEERETKTPECPSHT

SEQ ID NO: 202 - protein, 58 aa, Artificial Sequence
  Synthetic Peptide
QASSVPTAQPQAEGSLAKATTAPATTRNTGRGGEEKKKEKEKEEQEERETKTPECPSH

SEQ ID NO: 203 - protein, 58 aa, Artificial Sequence
  Synthetic Peptide
AQASSVPTAQPQAEGSLAKATTAPATTRNTGRGGEEKKKEKEKEEQEERETKTPECPS

SEQ ID NO: 204 - protein, 58 aa, Artificial Sequence
  Synthetic Peptide
KAQASSVPTAQPQAEGSLAKATTAPATTRNTGRGGEEKKKEKEKEEQEERETKTPECP

SEQ ID NO: 205 - protein, 58 aa, Artificial Sequence
  Synthetic Peptide
PKAQASSVPTAQPQAEGSLAKATTAPATTRNTGRGGEEKKKEKEKEEQEERETKTPEC

SEQ ID NO: 206 - protein, 58 aa, Artificial Sequence
  Synthetic Peptide
SPKAQASSVPTAQPQAEGSLAKATTAPATTRNTGRGGEEKKKEKEKEEQEERETKTPE

SEQ ID NO: 207 - protein, 58 aa, Artificial Sequence
  Synthetic Peptide
ESPKAQASSVPTAQPQAEGSLAKATTAPATTRNTGRGGEEKKKEKEKEEQEERETKTP

SEQ ID NO: 208 - protein, 58 aa, Artificial Sequence
  Synthetic Peptide
PESPKAQASSVPTAQPQAEGSLAKATTAPATTRNTGRGGEEKKKEKEKEEQEERETKT

SEQ ID NO: 209 - protein, 58 aa, Artificial Sequence
  Synthetic Peptide
WPESPKAQASSVPTAQPQAEGSLAKATTAPATTRNTGRGGEEKKKEKEKEEQEERETK

SEQ ID NO: 210 - protein, 58 aa, Artificial Sequence
  Synthetic Peptide
RWPESPKAQASSVPTAQPQAEGSLAKATTAPATTRNTGRGGEEKKKEKEKEEQEERET

SEQ ID NO: 211 - protein, 57 aa, Artificial Sequence
  Synthetic Peptide
EGSLAKATTAPATTRNTGRGGEEKKKEKEKEEQEERETKTPECPSHTQPLGVYLLTP

SEQ ID NO: 212 - protein, 57 aa, Artificial Sequence
  Synthetic Peptide
AEGSLAKATTAPATTRNTGRGGEEKKKEKEKEEQEERETKTPECPSHTQPLGVYLLT

SEQ ID NO: 213 - protein, 57 aa, Artificial Sequence
  Synthetic Peptide
QAEGSLAKATTAPATTRNTGRGGEEKKKEKEKEEQEERETKTPECPSHTQPLGVYLL

SEQ ID NO: 214 - protein, 57 aa, Artificial Sequence
  Synthetic Peptide
PQAEGSLAKATTAPATTRNTGRGGEEKKKEKEKEEQEERETKTPECPSHTQPLGVYL

SEQ ID NO: 215 - protein, 57 aa, Artificial Sequence
  Synthetic Peptide
QPQAEGSLAKATTAPATTRNTGRGGEEKKKEKEKEEQEERETKTPECPSHTQPLGVY

SEQ ID NO: 216 - protein, 57 aa, Artificial Sequence
  Synthetic Peptide
AQPQAEGSLAKATTAPATTRNTGRGGEEKKKEKEKEEQEERETKTPECPSHTQPLGV

SEQ ID NO: 217 - protein, 57 aa, Artificial Sequence
  Synthetic Peptide
TAQPQAEGSLAKATTAPATTRNTGRGGEEKKKEKEKEEQEERETKTPECPSHTQPLG

SEQ ID NO: 218 - protein, 57 aa, Artificial Sequence
  Synthetic Peptide
PTAQPQAEGSLAKATTAPATTRNTGRGGEEKKKEKEKEEQEERETKTPECPSHTQPL

SEQ ID NO: 219 - protein, 57 aa, Artificial Sequence
  Synthetic Peptide
VPTAQPQAEGSLAKATTAPATTRNTGRGGEEKKKEKEKEEQEERETKTPECPSHTQP

SEQ ID NO: 220 - protein, 57 aa, Artificial Sequence
  Synthetic Peptide
SVPTAQPQAEGSLAKATTAPATTRNTGRGGEEKKKEKEKEEQEERETKTPECPSHTQ

SEQ ID NO: 221 - protein, 57 aa, Artificial Sequence
  Synthetic Peptide
SSVPTAQPQAEGSLAKATTAPATTRNTGRGGEEKKKEKEKEEQEERETKTPECPSHT

SEQ ID NO: 222 - protein, 57 aa, Artificial Sequence
  Synthetic Peptide
ASSVPTAQPQAEGSLAKATTAPATTRNTGRGGEEKKKEKEKEEQEERETKTPECPSH

SEQ ID NO: 223 - protein, 57 aa, Artificial Sequence
  Synthetic Peptide
QASSVPTAQPQAEGSLAKATTAPATTRNTGRGGEEKKKEKEKEEQEERETKTPECPS

SEQ ID NO: 224 - protein, 57 aa, Artificial Sequence
  Synthetic Peptide
AQASSVPTAQPQAEGSLAKATTAPATTRNTGRGGEEKKKEKEKEEQEERETKTPECP

SEQ ID NO: 225 - protein, 57 aa, Artificial Sequence
  Synthetic Peptide
KAQASSVPTAQPQAEGSLAKATTAPATTRNTGRGGEEKKKEKEKEEQEERETKTPEC

SEQ ID NO: 226 - protein, 57 aa, Artificial Sequence
  Synthetic Peptide
PKAQASSVPTAQPQAEGSLAKATTAPATTRNTGRGGEEKKKEKEKEEQEERETKTPE

SEQ ID NO: 227 - protein, 57 aa, Artificial Sequence
  Synthetic Peptide
SPKAQASSVPTAQPQAEGSLAKATTAPATTRNTGRGGEEKKKEKEKEEQEERETKTP

SEQ ID NO: 228 - protein, 57 aa, Artificial Sequence
  Synthetic Peptide
ESPKAQASSVPTAQPQAEGSLAKATTAPATTRNTGRGGEEKKKEKEKEEQEERETKT

SEQ ID NO: 229 - protein, 57 aa, Artificial Sequence
  Synthetic Peptide
PESPKAQASSVPTAQPQAEGSLAKATTAPATTRNTGRGGEEKKKEKEKEEQEERETK

SEQ ID NO: 230 - protein, 57 aa, Artificial Sequence
  Synthetic Peptide
WPESPKAQASSVPTAQPQAEGSLAKATTAPATTRNTGRGGEEKKKEKEKEEQEERET

SEQ ID NO: 231 - protein, 57 aa, Artificial Sequence
  Synthetic Peptide
RWPESPKAQASSVPTAQPQAEGSLAKATTAPATTRNTGRGGEEKKKEKEKEEQEERE

SEQ ID NO: 232 - protein, 56 aa, Artificial Sequence
  Synthetic Peptide
GSLAKATTAPATTRNTGRGGEEKKKEKEKEEQEERETKTPECPSHTQPLGVYLLTP

SEQ ID NO: 233 - protein, 56 aa, Artificial Sequence
  Synthetic Peptide
EGSLAKATTAPATTRNTGRGGEEKKKEKEKEEQEERETKTPECPSHTQPLGVYLLT

SEQ ID NO: 234 - protein, 56 aa, Artificial Sequence
  Synthetic Peptide
AEGSLAKATTAPATTRNTGRGGEEKKKEKEKEEQEERETKTPECPSHTQPLGVYLL

SEQ ID NO: 235 - protein, 56 aa, Artificial Sequence
  Synthetic Peptide
QAEGSLAKATTAPATTRNTGRGGEEKKKEKEKEEQEERETKTPECPSHTQPLGVYL

SEQ ID NO: 236 - protein, 56 aa, Artificial Sequence
  Synthetic Peptide
PQAEGSLAKATTAPATTRNTGRGGEEKKKEKEKEEQEERETKTPECPSHTQPLGVY

SEQ ID NO: 237 - protein, 56 aa, Artificial Sequence
  Synthetic Peptide
QPQAEGSLAKATTAPATTRNTGRGGEEKKKEKEKEEQEERETKTPECPSHTQPLGV

SEQ ID NO: 238 - protein, 56 aa, Artificial Sequence
  Synthetic Peptide
AQPQAEGSLAKATTAPATTRNTGRGGEEKKKEKEKEEQEERETKTPECPSHTQPLG

SEQ ID NO: 239 - protein, 56 aa, Artificial Sequence
  Synthetic Peptide
TAQPQAEGSLAKATTAPATTRNTGRGGEEKKKEKEKEEQEERETKTPECPSHTQPL

SEQ ID NO: 240 - protein, 56 aa, Artificial Sequence
  Synthetic Peptide
PTAQPQAEGSLAKATTAPATTRNTGRGGEEKKKEKEKEEQEERETKTPECPSHTQP

SEQ ID NO: 241 - protein, 56 aa, Artificial Sequence
  Synthetic Peptide
VPTAQPQAEGSLAKATTAPATTRNTGRGGEEKKKEKEKEEQEERETKTPECPSHTQ

SEQ ID NO: 242 - protein, 56 aa, Artificial Sequence
  Synthetic Peptide
SVPTAQPQAEGSLAKATTAPATTRNTGRGGEEKKKEKEKEEQEERETKTPECPSHT

SEQ ID NO: 243 - protein, 56 aa, Artificial Sequence
  Synthetic Peptide
SSVPTAQPQAEGSLAKATTAPATTRNTGRGGEEKKKEKEKEEQEERETKTPECPSH

SEQ ID NO: 244 - protein, 56 aa, Artificial Sequence
  Synthetic Peptide
ASSVPTAQPQAEGSLAKATTAPATTRNTGRGGEEKKKEKEKEEQEERETKTPECPS

SEQ ID NO: 245 - protein, 56 aa, Artificial Sequence
  Synthetic Peptide
QASSVPTAQPQAEGSLAKATTAPATTRNTGRGGEEKKKEKEKEEQEERETKTPECP

SEQ ID NO: 246 - protein, 56 aa, Artificial Sequence
  Synthetic Peptide
AQASSVPTAQPQAEGSLAKATTAPATTRNTGRGGEEKKKEKEKEEQEERETKTPEC

SEQ ID NO: 247 - protein, 56 aa, Artificial Sequence
  Synthetic Peptide
KAQASSVPTAQPQAEGSLAKATTAPATTRNTGRGGEEKKKEKEKEEQEERETKTPE

SEQ ID NO: 248 - protein, 56 aa, Artificial Sequence
  Synthetic Peptide
PKAQASSVPTAQPQAEGSLAKATTAPATTRNTGRGGEEKKKEKEKEEQEERETKTP

SEQ ID NO: 249 - protein, 56 aa, Artificial Sequence
  Synthetic Peptide
SPKAQASSVPTAQPQAEGSLAKATTAPATTRNTGRGGEEKKKEKEKEEQEERETKT

SEQ ID NO: 250 - protein, 56 aa, Artificial Sequence
  Synthetic Peptide
ESPKAQASSVPTAQPQAEGSLAKATTAPATTRNTGRGGEEKKKEKEKEEQEERETK

SEQ ID NO: 251 - protein, 56 aa, Artificial Sequence
  Synthetic Peptide
PESPKAQASSVPTAQPQAEGSLAKATTAPATTRNTGRGGEEKKKEKEKEEQEERET

SEQ ID NO: 252 - protein, 56 aa, Artificial Sequence
  Synthetic Peptide
WPESPKAQASSVPTAQPQAEGSLAKATTAPATTRNTGRGGEEKKKEKEKEEQEERE

SEQ ID NO: 253 - protein, 56 aa, Artificial Sequence
  Synthetic Peptide
RWPESPKAQASSVPTAQPQAEGSLAKATTAPATTRNTGRGGEEKKKEKEKEEQEER

SEQ ID NO: 254 - protein, 55 aa, Artificial Sequence
  Synthetic Peptide
SLAKATTAPATTRNTGRGGEEKKKEKEKEEQEERETKTPECPSHTQPLGVYLLTP

SEQ ID NO: 255 - protein, 55 aa, Artificial Sequence
  Synthetic Peptide
GSLAKATTAPATTRNTGRGGEEKKKEKEKEEQEERETKTPECPSHTQPLGVYLLT

SEQ ID NO: 256 - protein, 55 aa, Artificial Sequence
  Synthetic Peptide
EGSLAKATTAPATTRNTGRGGEEKKKEKEKEEQEERETKTPECPSHTQPLGVYLL

SEQ ID NO: 257 - protein, 55 aa, Artificial Sequence
  Synthetic Peptide
AEGSLAKATTAPATTRNTGRGGEEKKKEKEKEEQEERETKTPECPSHTQPLGVYL

SEQ ID NO: 258 - protein, 55 aa, Artificial Sequence
  Synthetic Peptide
QAEGSLAKATTAPATTRNTGRGGEEKKKEKEKEEQEERETKTPECPSHTQPLGVY

SEQ ID NO: 259 - protein, 55 aa, Artificial Sequence
  Synthetic Peptide
PQAEGSLAKATTAPATTRNTGRGGEEKKKEKEKEEQEERETKTPECPSHTQPLGV

SEQ ID NO: 260 - protein, 55 aa, Artificial Sequence
  Synthetic Peptide
QPQAEGSLAKATTAPATTRNTGRGGEEKKKEKEKEEQEERETKTPECPSHTQPLG

SEQ ID NO: 261 - protein, 55 aa, Artificial Sequence
  Synthetic Peptide
AQPQAEGSLAKATTAPATTRNTGRGGEEKKKEKEKEEQEERETKTPECPSHTQPL

SEQ ID NO: 262 - protein, 55 aa, Artificial Sequence
  Synthetic Peptide
TAQPQAEGSLAKATTAPATTRNTGRGGEEKKKEKEKEEQEERETKTPECPSHTQP

SEQ ID NO: 263 - protein, 55 aa, Artificial Sequence
  Synthetic Peptide
PTAQPQAEGSLAKATTAPATTRNTGRGGEEKKKEKEKEEQEERETKTPECPSHTQ

SEQ ID NO: 264 - protein, 55 aa, Artificial Sequence
  Synthetic Peptide
VPTAQPQAEGSLAKATTAPATTRNTGRGGEEKKKEKEKEEQEERETKTPECPSHT

SEQ ID NO: 265 - protein, 55 aa, Artificial Sequence
  Synthetic Peptide
SVPTAQPQAEGSLAKATTAPATTRNTGRGGEEKKKEKEKEEQEERETKTPECPSH

SEQ ID NO: 266 - protein, 55 aa, Artificial Sequence
  Synthetic Peptide
SSVPTAQPQAEGSLAKATTAPATTRNTGRGGEEKKKEKEKEEQEERETKTPECPS

SEQ ID NO: 267 - protein, 55 aa, Artificial Sequence
  Synthetic Peptide
ASSVPTAQPQAEGSLAKATTAPATTRNTGRGGEEKKKEKEKEEQEERETKTPECP

SEQ ID NO: 268 - protein, 55 aa, Artificial Sequence
  Synthetic Peptide
QASSVPTAQPQAEGSLAKATTAPATTRNTGRGGEEKKKEKEKEEQEERETKTPEC

SEQ ID NO: 269 - protein, 55 aa, Artificial Sequence
  Synthetic Peptide
AQASSVPTAQPQAEGSLAKATTAPATTRNTGRGGEEKKKEKEKEEQEERETKTPE

SEQ ID NO: 270 - protein, 55 aa, Artificial Sequence
  Synthetic Peptide
KAQASSVPTAQPQAEGSLAKATTAPATTRNTGRGGEEKKKEKEKEEQEERETKTP

SEQ ID NO: 271 - protein, 55 aa, Artificial Sequence
  Synthetic Peptide
PKAQASSVPTAQPQAEGSLAKATTAPATTRNTGRGGEEKKKEKEKEEQEERETKT

SEQ ID NO: 272 - protein, 55 aa, Artificial Sequence
  Synthetic Peptide
SPKAQASSVPTAQPQAEGSLAKATTAPATTRNTGRGGEEKKKEKEKEEQEERETK

SEQ ID NO: 273 - protein, 55 aa, Artificial Sequence
  Synthetic Peptide
ESPKAQASSVPTAQPQAEGSLAKATTAPATTRNTGRGGEEKKKEKEKEEQEERET

SEQ ID NO: 274 - protein, 55 aa, Artificial Sequence
  Synthetic Peptide
PESPKAQASSVPTAQPQAEGSLAKATTAPATTRNTGRGGEEKKKEKEKEEQEERE

SEQ ID NO: 275 - protein, 55 aa, Artificial Sequence
  Synthetic Peptide
WPESPKAQASSVPTAQPQAEGSLAKATTAPATTRNTGRGGEEKKKEKEKEEQEER

SEQ ID NO: 276 - protein, 55 aa, Artificial Sequence
  Synthetic Peptide
RWPESPKAQASSVPTAQPQAEGSLAKATTAPATTRNTGRGGEEKKKEKEKEEQEE

SEQ ID NO: 277 - protein, 54 aa, Artificial Sequence
  Synthetic Peptide
LAKATTAPATTRNTGRGGEEKKKEKEKEEQEERETKTPECPSHTQPLGVYLLTP

SEQ ID NO: 278 - protein, 54 aa, Artificial Sequence
  Synthetic Peptide
SLAKATTAPATTRNTGRGGEEKKKEKEKEEQEERETKTPECPSHTQPLGVYLLT

SEQ ID NO: 279 - protein, 54 aa, Artificial Sequence
  Synthetic Peptide
GSLAKATTAPATTRNTGRGGEEKKKEKEKEEQEERETKTPECPSHTQPLGVYLL

SEQ ID NO: 280 - protein, 54 aa, Artificial Sequence
  Synthetic Peptide
EGSLAKATTAPATTRNTGRGGEEKKKEKEKEEQEERETKTPECPSHTQPLGVYL

SEQ ID NO: 281 - protein, 54 aa, Artificial Sequence
  Synthetic Peptide
AEGSLAKATTAPATTRNTGRGGEEKKKEKEKEEQEERETKTPECPSHTQPLGVY

SEQ ID NO: 282 - protein, 54 aa, Artificial Sequence
  Synthetic Peptide
QAEGSLAKATTAPATTRNTGRGGEEKKKEKEKEEQEERETKTPECPSHTQPLGV

SEQ ID NO: 283 - protein, 54 aa, Artificial Sequence
  Synthetic Peptide
PQAEGSLAKATTAPATTRNTGRGGEEKKKEKEKEEQEERETKTPECPSHTQPLG

SEQ ID NO: 284 - protein, 54 aa, Artificial Sequence
  Synthetic Peptide
QPQAEGSLAKATTAPATTRNTGRGGEEKKKEKEKEEQEERETKTPECPSHTQPL

SEQ ID NO: 285 - protein, 54 aa, Artificial Sequence
  Synthetic Peptide
AQPQAEGSLAKATTAPATTRNTGRGGEEKKKEKEKEEQEERETKTPECPSHTQP

SEQ ID NO: 286 - protein, 54 aa, Artificial Sequence
  Synthetic Peptide
TAQPQAEGSLAKATTAPATTRNTGRGGEEKKKEKEKEEQEERETKTPECPSHTQ

SEQ ID NO: 287 - protein, 54 aa, Artificial Sequence
  Synthetic Peptide
PTAQPQAEGSLAKATTAPATTRNTGRGGEEKKKEKEKEEQEERETKTPECPSHT

SEQ ID NO: 288 - protein, 54 aa, Artificial Sequence
  Synthetic Peptide
VPTAQPQAEGSLAKATTAPATTRNTGRGGEEKKKEKEKEEQEERETKTPECPSH

SEQ ID NO: 289 - protein, 54 aa, Artificial Sequence
  Synthetic Peptide
SVPTAQPQAEGSLAKATTAPATTRNTGRGGEEKKKEKEKEEQEERETKTPECPS

SEQ ID NO: 290 - protein, 54 aa, Artificial Sequence
  Synthetic Peptide
SSVPTAQPQAEGSLAKATTAPATTRNTGRGGEEKKKEKEKEEQEERETKTPECP

SEQ ID NO: 291 - protein, 54 aa, Artificial Sequence
  Synthetic Peptide
ASSVPTAQPQAEGSLAKATTAPATTRNTGRGGEEKKKEKEKEEQEERETKTPEC

SEQ ID NO: 292 - protein, 54 aa, Artificial Sequence
  Synthetic Peptide
QASSVPTAQPQAEGSLAKATTAPATTRNTGRGGEEKKKEKEKEEQEERETKTPE

SEQ ID NO: 293 - protein, 54 aa, Artificial Sequence
  Synthetic Peptide
AQASSVPTAQPQAEGSLAKATTAPATTRNTGRGGEEKKKEKEKEEQEERETKTP

SEQ ID NO: 294 - protein, 54 aa, Artificial Sequence
  Synthetic Peptide
KAQASSVPTAQPQAEGSLAKATTAPATTRNTGRGGEEKKKEKEKEEQEERETKT

SEQ ID NO: 295 - protein, 54 aa, Artificial Sequence
  Synthetic Peptide
PKAQASSVPTAQPQAEGSLAKATTAPATTRNTGRGGEEKKKEKEKEEQEERETK

SEQ ID NO: 296 - protein, 54 aa, Artificial Sequence
  Synthetic Peptide
SPKAQASSVPTAQPQAEGSLAKATTAPATTRNTGRGGEEKKKEKEKEEQEERET

SEQ ID NO: 297 - protein, 54 aa, Artificial Sequence
  Synthetic Peptide
ESPKAQASSVPTAQPQAEGSLAKATTAPATTRNTGRGGEEKKKEKEKEEQEERE

SEQ ID NO: 298 - protein, 54 aa, Artificial Sequence
  Synthetic Peptide
PESPKAQASSVPTAQPQAEGSLAKATTAPATTRNTGRGGEEKKKEKEKEEQEER

SEQ ID NO: 299 - protein, 54 aa, Artificial Sequence
  Synthetic Peptide
WPESPKAQASSVPTAQPQAEGSLAKATTAPATTRNTGRGGEEKKKEKEKEEQEE

SEQ ID NO: 300 - protein, 54 aa, Artificial Sequence
  Synthetic Peptide
RWPESPKAQASSVPTAQPQAEGSLAKATTAPATTRNTGRGGEEKKKEKEKEEQE

SEQ ID NO: 301 - protein, 53 aa, Artificial Sequence
  Synthetic Peptide
AKATTAPATTRNTGRGGEEKKKEKEKEEQEERETKTPECPSHTQPLGVYLLTP

SEQ ID NO: 302 - protein, 53 aa, Artificial Sequence
  Synthetic Peptide
LAKATTAPATTRNTGRGGEEKKKEKEKEEQEERETKTPECPSHTQPLGVYLLT

SEQ ID NO: 303 - protein, 53 aa, Artificial Sequence
  Synthetic Peptide
SLAKATTAPATTRNTGRGGEEKKKEKEKEEQEERETKTPECPSHTQPLGVYLL

SEQ ID NO: 304 - protein, 53 aa, Artificial Sequence
  Synthetic Peptide
GSLAKATTAPATTRNTGRGGEEKKKEKEKEEQEERETKTPECPSHTQPLGVYL

SEQ ID NO: 305 - protein, 53 aa, Artificial Sequence
  Synthetic Peptide
EGSLAKATTAPATTRNTGRGGEEKKKEKEKEEQEERETKTPECPSHTQPLGVY

SEQ ID NO: 306 - protein, 53 aa, Artificial Sequence
  Synthetic Peptide
AEGSLAKATTAPATTRNTGRGGEEKKKEKEKEEQEERETKTPECPSHTQPLGV

SEQ ID NO: 307 - protein, 53 aa, Artificial Sequence
  Synthetic Peptide
QAEGSLAKATTAPATTRNTGRGGEEKKKEKEKEEQEERETKTPECPSHTQPLG

SEQ ID NO: 308 - protein, 53 aa, Artificial Sequence
  Synthetic Peptide
PQAEGSLAKATTAPATTRNTGRGGEEKKKEKEKEEQEERETKTPECPSHTQPL

SEQ ID NO: 309 - protein, 53 aa, Artificial Sequence
  Synthetic Peptide
QPQAEGSLAKATTAPATTRNTGRGGEEKKKEKEKEEQEERETKTPECPSHTQP

SEQ ID NO: 310 - protein, 53 aa, Artificial Sequence
  Synthetic Peptide
AQPQAEGSLAKATTAPATTRNTGRGGEEKKKEKEKEEQEERETKTPECPSHTQ

SEQ ID NO: 311 - protein, 53 aa, Artificial Sequence
  Synthetic Peptide
TAQPQAEGSLAKATTAPATTRNTGRGGEEKKKEKEKEEQEERETKTPECPSHT

SEQ ID NO: 312 - protein, 53 aa, Artificial Sequence
  Synthetic Peptide
PTAQPQAEGSLAKATTAPATTRNTGRGGEEKKKEKEKEEQEERETKTPECPSH

SEQ ID NO: 313 - protein, 53 aa, Artificial Sequence
  Synthetic Peptide
VPTAQPQAEGSLAKATTAPATTRNTGRGGEEKKKEKEKEEQEERETKTPECPS

SEQ ID NO: 314 - protein, 53 aa, Artificial Sequence
  Synthetic Peptide
SVPTAQPQAEGSLAKATTAPATTRNTGRGGEEKKKEKEKEEQEERETKTPECP

SEQ ID NO: 315 - protein, 53 aa, Artificial Sequence
  Synthetic Peptide
SSVPTAQPQAEGSLAKATTAPATTRNTGRGGEEKKKEKEKEEQEERETKTPEC

SEQ ID NO: 316 - protein, 53 aa, Artificial Sequence
  Synthetic Peptide
ASSVPTAQPQAEGSLAKATTAPATTRNTGRGGEEKKKEKEKEEQEERETKTPE

SEQ ID NO: 317 - protein, 53 aa, Artificial Sequence
  Synthetic Peptide
QASSVPTAQPQAEGSLAKATTAPATTRNTGRGGEEKKKEKEKEEQEERETKTP

SEQ ID NO: 318 - protein, 53 aa, Artificial Sequence
  Synthetic Peptide
AQASSVPTAQPQAEGSLAKATTAPATTRNTGRGGEEKKKEKEKEEQEERETKT

SEQ ID NO: 319 - protein, 53 aa, Artificial Sequence
  Synthetic Peptide
KAQASSVPTAQPQAEGSLAKATTAPATTRNTGRGGEEKKKEKEKEEQEERETK

SEQ ID NO: 320 - protein, 53 aa, Artificial Sequence
  Synthetic Peptide
PKAQASSVPTAQPQAEGSLAKATTAPATTRNTGRGGEEKKKEKEKEEQEERET

SEQ ID NO: 321 - protein, 53 aa, Artificial Sequence
  Synthetic Peptide
SPKAQASSVPTAQPQAEGSLAKATTAPATTRNTGRGGEEKKKEKEKEEQEERE

SEQ ID NO: 322 - protein, 53 aa, Artificial Sequence
  Synthetic Peptide
ESPKAQASSVPTAQPQAEGSLAKATTAPATTRNTGRGGEEKKKEKEKEEQEER

SEQ ID NO: 323 - protein, 53 aa, Artificial Sequence
  Synthetic Peptide
PESPKAQASSVPTAQPQAEGSLAKATTAPATTRNTGRGGEEKKKEKEKEEQEE

SEQ ID NO: 324 - protein, 53 aa, Artificial Sequence
  Synthetic Peptide
WPESPKAQASSVPTAQPQAEGSLAKATTAPATTRNTGRGGEEKKKEKEKEEQE

SEQ ID NO: 325 - protein, 53 aa, Artificial Sequence
  Synthetic Peptide
RWPESPKAQASSVPTAQPQAEGSLAKATTAPATTRNTGRGGEEKKKEKEKEEQ

SEQ ID NO: 326 - protein, 52 aa, Artificial Sequence
  Synthetic Peptide
KATTAPATTRNTGRGGEEKKKEKEKEEQEERETKTPECPSHTQPLGVYLLTP

SEQ ID NO: 327 - protein, 52 aa, Artificial Sequence
  Synthetic Peptide
AKATTAPATTRNTGRGGEEKKKEKEKEEQEERETKTPECPSHTQPLGVYLLT

SEQ ID NO: 328 - protein, 52 aa, Artificial Sequence
  Synthetic Peptide
LAKATTAPATTRNTGRGGEEKKKEKEKEEQEERETKTPECPSHTQPLGVYLL

SEQ ID NO: 329 - protein, 52 aa, Artificial Sequence
  Synthetic Peptide
SLAKATTAPATTRNTGRGGEEKKKEKEKEEQEERETKTPECPSHTQPLGVYL

SEQ ID NO: 330 - protein, 52 aa, Artificial Sequence
  Synthetic Peptide
GSLAKATTAPATTRNTGRGGEEKKKEKEKEEQEERETKTPECPSHTQPLGVY

SEQ ID NO: 331 - protein, 52 aa, Artificial Sequence
  Synthetic Peptide
EGSLAKATTAPATTRNTGRGGEEKKKEKEKEEQEERETKTPECPSHTQPLGV

SEQ ID NO: 332 - protein, 52 aa, Artificial Sequence
  Synthetic Peptide
AEGSLAKATTAPATTRNTGRGGEEKKKEKEKEEQEERETKTPECPSHTQPLG

SEQ ID NO: 333 - protein, 52 aa, Artificial Sequence
  Synthetic Peptide
QAEGSLAKATTAPATTRNTGRGGEEKKKEKEKEEQEERETKTPECPSHTQPL

SEQ ID NO: 334 - protein, 52 aa, Artificial Sequence
  Synthetic Peptide
PQAEGSLAKATTAPATTRNTGRGGEEKKKEKEKEEQEERETKTPECPSHTQP

SEQ ID NO: 335 - protein, 52 aa, Artificial Sequence
  Synthetic Peptide
QPQAEGSLAKATTAPATTRNTGRGGEEKKKEKEKEEQEERETKTPECPSHTQ

SEQ ID NO: 336 - protein, 52 aa, Artificial Sequence
  Synthetic Peptide
AQPQAEGSLAKATTAPATTRNTGRGGEEKKKEKEKEEQEERETKTPECPSHT

SEQ ID NO: 337 - protein, 52 aa, Artificial Sequence
  Synthetic Peptide
TAQPQAEGSLAKATTAPATTRNTGRGGEEKKKEKEKEEQEERETKTPECPSH

SEQ ID NO: 338 - protein, 52 aa, Artificial Sequence
  Synthetic Peptide
PTAQPQAEGSLAKATTAPATTRNTGRGGEEKKKEKEKEEQEERETKTPECPS

SEQ ID NO: 339 - protein, 52 aa, Artificial Sequence
  Synthetic Peptide
VPTAQPQAEGSLAKATTAPATTRNTGRGGEEKKKEKEKEEQEERETKTPECP

SEQ ID NO: 340 - protein, 52 aa, Artificial Sequence
  Synthetic Peptide
SVPTAQPQAEGSLAKATTAPATTRNTGRGGEEKKKEKEKEEQEERETKTPEC

SEQ ID NO: 341 - protein, 52 aa, Artificial Sequence
  Synthetic Peptide
SSVPTAQPQAEGSLAKATTAPATTRNTGRGGEEKKKEKEKEEQEERETKTPE

SEQ ID NO: 342 - protein, 52 aa, Artificial Sequence
  Synthetic Peptide
ASSVPTAQPQAEGSLAKATTAPATTRNTGRGGEEKKKEKEKEEQEERETKTP

SEQ ID NO: 343 - protein, 52 aa, Artificial Sequence
  Synthetic Peptide
QASSVPTAQPQAEGSLAKATTAPATTRNTGRGGEEKKKEKEKEEQEERETKT

SEQ ID NO: 344 - protein, 52 aa, Artificial Sequence
  Synthetic Peptide
AQASSVPTAQPQAEGSLAKATTAPATTRNTGRGGEEKKKEKEKEEQEERETK

SEQ ID NO: 345 - protein, 52 aa, Artificial Sequence
  Synthetic Peptide
KAQASSVPTAQPQAEGSLAKATTAPATTRNTGRGGEEKKKEKEKEEQEERET

SEQ ID NO: 346 - protein, 52 aa, Artificial Sequence
  Synthetic Peptide
PKAQASSVPTAQPQAEGSLAKATTAPATTRNTGRGGEEKKKEKEKEEQEERE

SEQ ID NO: 347 - protein, 52 aa, Artificial Sequence
  Synthetic Peptide
SPKAQASSVPTAQPQAEGSLAKATTAPATTRNTGRGGEEKKKEKEKEEQEER

SEQ ID NO: 348 - protein, 52 aa, Artificial Sequence
  Synthetic Peptide
ESPKAQASSVPTAQPQAEGSLAKATTAPATTRNTGRGGEEKKKEKEKEEQEE

SEQ ID NO: 349 - protein, 52 aa, Artificial Sequence
  Synthetic Peptide
PESPKAQASSVPTAQPQAEGSLAKATTAPATTRNTGRGGEEKKKEKEKEEQE

SEQ ID NO: 350 - protein, 52 aa, Artificial Sequence
  Synthetic Peptide
WPESPKAQASSVPTAQPQAEGSLAKATTAPATTRNTGRGGEEKKKEKEKEEQ

SEQ ID NO: 351 - protein, 52 aa, Artificial Sequence
  Synthetic Peptide
RWPESPKAQASSVPTAQPQAEGSLAKATTAPATTRNTGRGGEEKKKEKEKEE

SEQ ID NO: 352 - protein, 51 aa, Artificial Sequence
  Synthetic Peptide
ATTAPATTRNTGRGGEEKKKEKEKEEQEERETKTPECPSHTQPLGVYLLTP

SEQ ID NO: 353 - protein, 51 aa, Artificial Sequence
  Synthetic Peptide
KATTAPATTRNTGRGGEEKKKEKEKEEQEERETKTPECPSHTQPLGVYLLT

SEQ ID NO: 354 - protein, 51 aa, Artificial Sequence
  Synthetic Peptide
AKATTAPATTRNTGRGGEEKKKEKEKEEQEERETKTPECPSHTQPLGVYLL

SEQ ID NO: 355 - protein, 51 aa, Artificial Sequence
  Synthetic Peptide
LAKATTAPATTRNTGRGGEEKKKEKEKEEQEERETKTPECPSHTQPLGVYL

SEQ ID NO: 356 - protein, 51 aa, Artificial Sequence
  Synthetic Peptide
SLAKATTAPATTRNTGRGGEEKKKEKEKEEQEERETKTPECPSHTQPLGVY

SEQ ID NO: 357 - protein, 51 aa, Artificial Sequence
  Synthetic Peptide
GSLAKATTAPATTRNTGRGGEEKKKEKEKEEQEERETKTPECPSHTQPLGV

SEQ ID NO: 358 - protein, 51 aa, Artificial Sequence
  Synthetic Peptide
EGSLAKATTAPATTRNTGRGGEEKKKEKEKEEQEERETKTPECPSHTQPLG

SEQ ID NO: 359 - protein, 51 aa, Artificial Sequence
  Synthetic Peptide
AEGSLAKATTAPATTRNTGRGGEEKKKEKEKEEQEERETKTPECPSHTQPL

SEQ ID NO: 360 - protein, 51 aa, Artificial Sequence
  Synthetic Peptide
QAEGSLAKATTAPATTRNTGRGGEEKKKEKEKEEQEERETKTPECPSHTQP

SEQ ID NO: 361 - protein, 51 aa, Artificial Sequence
  Synthetic Peptide
PQAEGSLAKATTAPATTRNTGRGGEEKKKEKEKEEQEERETKTPECPSHTQ

SEQ ID NO: 362 - protein, 51 aa, Artificial Sequence
  Synthetic Peptide
QPQAEGSLAKATTAPATTRNTGRGGEEKKKEKEKEEQEERETKTPECPSHT

SEQ ID NO: 363 - protein, 51 aa, Artificial Sequence
  Synthetic Peptide
AQPQAEGSLAKATTAPATTRNTGRGGEEKKKEKEKEEQEERETKTPECPSH

SEQ ID NO: 364 - protein, 51 aa, Artificial Sequence
  Synthetic Peptide
TAQPQAEGSLAKATTAPATTRNTGRGGEEKKKEKEKEEQEERETKTPECPS

SEQ ID NO: 365 - protein, 51 aa, Artificial Sequence
  Synthetic Peptide
PTAQPQAEGSLAKATTAPATTRNTGRGGEEKKKEKEKEEQEERETKTPECP

SEQ ID NO: 366 - protein, 51 aa, Artificial Sequence
  Synthetic Peptide
VPTAQPQAEGSLAKATTAPATTRNTGRGGEEKKKEKEKEEQEERETKTPEC

SEQ ID NO: 367 - protein, 51 aa, Artificial Sequence
  Synthetic Peptide
SVPTAQPQAEGSLAKATTAPATTRNTGRGGEEKKKEKEKEEQEERETKTPE

SEQ ID NO: 368 - protein, 51 aa, Artificial Sequence
  Synthetic Peptide
SSVPTAQPQAEGSLAKATTAPATTRNTGRGGEEKKKEKEKEEQEERETKTP

SEQ ID NO: 369 - protein, 51 aa, Artificial Sequence
  Synthetic Peptide
ASSVPTAQPQAEGSLAKATTAPATTRNTGRGGEEKKKEKEKEEQEERETKT

SEQ ID NO: 370 - protein, 51 aa, Artificial Sequence
  Synthetic Peptide
QASSVPTAQPQAEGSLAKATTAPATTRNTGRGGEEKKKEKEKEEQEERETK

SEQ ID NO: 371 - protein, 51 aa, Artificial Sequence
  Synthetic Peptide
AQASSVPTAQPQAEGSLAKATTAPATTRNTGRGGEEKKKEKEKEEQEERET

SEQ ID NO: 372 - protein, 51 aa, Artificial Sequence
  Synthetic Peptide
KAQASSVPTAQPQAEGSLAKATTAPATTRNTGRGGEEKKKEKEKEEQEERE

SEQ ID NO: 373 - protein, 51 aa, Artificial Sequence
  Synthetic Peptide
PKAQASSVPTAQPQAEGSLAKATTAPATTRNTGRGGEEKKKEKEKEEQEER

SEQ ID NO: 374 - protein, 51 aa, Artificial Sequence
  Synthetic Peptide
SPKAQASSVPTAQPQAEGSLAKATTAPATTRNTGRGGEEKKKEKEKEEQEE

SEQ ID NO: 375 - protein, 51 aa, Artificial Sequence
  Synthetic Peptide
ESPKAQASSVPTAQPQAEGSLAKATTAPATTRNTGRGGEEKKKEKEKEEQE

SEQ ID NO: 376 - protein, 51 aa, Artificial Sequence
  Synthetic Peptide
PESPKAQASSVPTAQPQAEGSLAKATTAPATTRNTGRGGEEKKKEKEKEEQ

SEQ ID NO: 377 - protein, 51 aa, Artificial Sequence
  Synthetic Peptide
WPESPKAQASSVPTAQPQAEGSLAKATTAPATTRNTGRGGEEKKKEKEKEE

SEQ ID NO: 378 - protein, 51 aa, Artificial Sequence
  Synthetic Peptide
RWPESPKAQASSVPTAQPQAEGSLAKATTAPATTRNTGRGGEEKKKEKEKE

SEQ ID NO: 379 - protein, 50 aa, Artificial Sequence
  Synthetic Peptide
TTAPATTRNTGRGGEEKKKEKEKEEQEERETKTPECPSHTQPLGVYLLTP

SEQ ID NO: 380 - protein, 50 aa, Artificial Sequence
  Synthetic Peptide
ATTAPATTRNTGRGGEEKKKEKEKEEQEERETKTPECPSHTQPLGVYLLT

SEQ ID NO: 381 - protein, 50 aa, Artificial Sequence
  Synthetic Peptide
KATTAPATTRNTGRGGEEKKKEKEKEEQEERETKTPECPSHTQPLGVYLL

SEQ ID NO: 382 - protein, 50 aa, Artificial Sequence
  Synthetic Peptide
AKATTAPATTRNTGRGGEEKKKEKEKEEQEERETKTPECPSHTQPLGVYL

SEQ ID NO: 383 - protein, 50 aa, Artificial Sequence
  Synthetic Peptide
LAKATTAPATTRNTGRGGEEKKKEKEKEEQEERETKTPECPSHTQPLGVY

SEQ ID NO: 384 - protein, 50 aa, Artificial Sequence
  Synthetic Peptide
SLAKATTAPATTRNTGRGGEEKKKEKEKEEQEERETKTPECPSHTQPLGV

SEQ ID NO: 385 - protein, 50 aa, Artificial Sequence
  Synthetic Peptide
GSLAKATTAPATTRNTGRGGEEKKKEKEKEEQEERETKTPECPSHTQPLG

SEQ ID NO: 386 - protein, 50 aa, Artificial Sequence
  Synthetic Peptide
EGSLAKATTAPATTRNTGRGGEEKKKEKEKEEQEERETKTPECPSHTQPL

SEQ ID NO: 387 - protein, 50 aa, Artificial Sequence
  Synthetic Peptide
AEGSLAKATTAPATTRNTGRGGEEKKKEKEKEEQEERETKTPECPSHTQP

SEQ ID NO: 388 - protein, 50 aa, Artificial Sequence
  Synthetic Peptide
QAEGSLAKATTAPATTRNTGRGGEEKKKEKEKEEQEERETKTPECPSHTQ

SEQ ID NO: 389 - protein, 50 aa, Artificial Sequence
  Synthetic Peptide
PQAEGSLAKATTAPATTRNTGRGGEEKKKEKEKEEQEERETKTPECPSHT

SEQ ID NO: 390 - protein, 50 aa, Artificial Sequence
  Synthetic Peptide
QPQAEGSLAKATTAPATTRNTGRGGEEKKKEKEKEEQEERETKTPECPSH

SEQ ID NO: 391 - protein, 50 aa, Artificial Sequence
  Synthetic Peptide
AQPQAEGSLAKATTAPATTRNTGRGGEEKKKEKEKEEQEERETKTPECPS

SEQ ID NO: 392 - protein, 50 aa, Artificial Sequence
  Synthetic Peptide
TAQPQAEGSLAKATTAPATTRNTGRGGEEKKKEKEKEEQEERETKTPECP

SEQ ID NO: 393 - protein, 50 aa, Artificial Sequence
  Synthetic Peptide
PTAQPQAEGSLAKATTAPATTRNTGRGGEEKKKEKEKEEQEERETKTPEC

SEQ ID NO: 394 - protein, 50 aa, Artificial Sequence
  Synthetic Peptide
VPTAQPQAEGSLAKATTAPATTRNTGRGGEEKKKEKEKEEQEERETKTPE

SEQ ID NO: 395 - protein, 50 aa, Artificial Sequence
  Synthetic Peptide
SVPTAQPQAEGSLAKATTAPATTRNTGRGGEEKKKEKEKEEQEERETKTP

SEQ ID NO: 396 - protein, 50 aa, Artificial Sequence
  Synthetic Peptide
SSVPTAQPQAEGSLAKATTAPATTRNTGRGGEEKKKEKEKEEQEERETKT

SEQ ID NO: 397 - protein, 50 aa, Artificial Sequence
  Synthetic Peptide
ASSVPTAQPQAEGSLAKATTAPATTRNTGRGGEEKKKEKEKEEQEERETK

SEQ ID NO: 398 - protein, 50 aa, Artificial Sequence
  Synthetic Peptide
QASSVPTAQPQAEGSLAKATTAPATTRNTGRGGEEKKKEKEKEEQEERET

SEQ ID NO: 399 - protein, 50 aa, Artificial Sequence
  Synthetic Peptide
AQASSVPTAQPQAEGSLAKATTAPATTRNTGRGGEEKKKEKEKEEQEERE

SEQ ID NO: 400 - protein, 50 aa, Artificial Sequence
  Synthetic Peptide
KAQASSVPTAQPQAEGSLAKATTAPATTRNTGRGGEEKKKEKEKEEQEER

SEQ ID NO: 401 - protein, 50 aa, Artificial Sequence
  Synthetic Peptide
PKAQASSVPTAQPQAEGSLAKATTAPATTRNTGRGGEEKKKEKEKEEQEE

SEQ ID NO: 402 - protein, 50 aa, Artificial Sequence
  Synthetic Peptide
SPKAQASSVPTAQPQAEGSLAKATTAPATTRNTGRGGEEKKKEKEKEEQE

SEQ ID NO: 403 - protein, 50 aa, Artificial Sequence
  Synthetic Peptide
ESPKAQASSVPTAQPQAEGSLAKATTAPATTRNTGRGGEEKKKEKEKEEQ

SEQ ID NO: 404 - protein, 50 aa, Artificial Sequence
  Synthetic Peptide
PESPKAQASSVPTAQPQAEGSLAKATTAPATTRNTGRGGEEKKKEKEKEE

SEQ ID NO: 405 - protein, 50 aa, Artificial Sequence
  Synthetic Peptide
WPESPKAQASSVPTAQPQAEGSLAKATTAPATTRNTGRGGEEKKKEKEKE

SEQ ID NO: 406 - protein, 50 aa, Artificial Sequence
  Synthetic Peptide
RWPESPKAQASSVPTAQPQAEGSLAKATTAPATTRNTGRGGEEKKKEKEK

SEQ ID NO: 407 - protein, 49 aa, Artificial Sequence
  Synthetic Peptide
TAPATTRNTGRGGEEKKKEKEKEEQEERETKTPECPSHTQPLGVYLLTP

SEQ ID NO: 408 - protein, 49 aa, Artificial Sequence
  Synthetic Peptide
TTAPATTRNTGRGGEEKKKEKEKEEQEERETKTPECPSHTQPLGVYLLT

SEQ ID NO: 409 - protein, 49 aa, Artificial Sequence
  Synthetic Peptide
ATTAPATTRNTGRGGEEKKKEKEKEEQEERETKTPECPSHTQPLGVYLL

SEQ ID NO: 410 - protein, 49 aa, Artificial Sequence
  Synthetic Peptide
KATTAPATTRNTGRGGEEKKKEKEKEEQEERETKTPECPSHTQPLGVYL

SEQ ID NO: 411 - protein, 49 aa, Artificial Sequence
  Synthetic Peptide
AKATTAPATTRNTGRGGEEKKKEKEKEEQEERETKTPECPSHTQPLGVY

SEQ ID NO: 412 - protein, 49 aa, Artificial Sequence
  Synthetic Peptide
LAKATTAPATTRNTGRGGEEKKKEKEKEEQEERETKTPECPSHTQPLGV

SEQ ID NO: 413 - protein, 49 aa, Artificial Sequence
  Synthetic Peptide
SLAKATTAPATTRNTGRGGEEKKKEKEKEEQEERETKTPECPSHTQPLG

SEQ ID NO: 414 - protein, 49 aa, Artificial Sequence
  Synthetic Peptide
GSLAKATTAPATTRNTGRGGEEKKKEKEKEEQEERETKTPECPSHTQPL

SEQ ID NO: 415 - protein, 49 aa, Artificial Sequence
  Synthetic Peptide
EGSLAKATTAPATTRNTGRGGEEKKKEKEKEEQEERETKTPECPSHTQP

SEQ ID NO: 416 - protein, 49 aa, Artificial Sequence
  Synthetic Peptide
AEGSLAKATTAPATTRNTGRGGEEKKKEKEKEEQEERETKTPECPSHTQ

SEQ ID NO: 417 - protein, 49 aa, Artificial Sequence
  Synthetic Peptide
QAEGSLAKATTAPATTRNTGRGGEEKKKEKEKEEQEERETKTPECPSHT

SEQ ID NO: 418 - protein, 49 aa, Artificial Sequence
  Synthetic Peptide
PQAEGSLAKATTAPATTRNTGRGGEEKKKEKEKEEQEERETKTPECPSH

SEQ ID NO: 419 - protein, 49 aa, Artificial Sequence
  Synthetic Peptide
QPQAEGSLAKATTAPATTRNTGRGGEEKKKEKEKEEQEERETKTPECPS

SEQ ID NO: 420 - protein, 49 aa, Artificial Sequence
  Synthetic Peptide
AQPQAEGSLAKATTAPATTRNTGRGGEEKKKEKEKEEQEERETKTPECP

SEQ ID NO: 421 - protein, 49 aa, Artificial Sequence
  Synthetic Peptide
TAQPQAEGSLAKATTAPATTRNTGRGGEEKKKEKEKEEQEERETKTPEC

SEQ ID NO: 422 - protein, 49 aa, Artificial Sequence
  Synthetic Peptide
PTAQPQAEGSLAKATTAPATTRNTGRGGEEKKKEKEKEEQEERETKTPE

SEQ ID NO: 423 - protein, 49 aa, Artificial Sequence
  Synthetic Peptide
VPTAQPQAEGSLAKATTAPATTRNTGRGGEEKKKEKEKEEQEERETKTP

SEQ ID NO: 424 - protein, 49 aa, Artificial Sequence
  Synthetic Peptide
SVPTAQPQAEGSLAKATTAPATTRNTGRGGEEKKKEKEKEEQEERETKT

SEQ ID NO: 425 - protein, 49 aa, Artificial Sequence
  Synthetic Peptide
SSVPTAQPQAEGSLAKATTAPATTRNTGRGGEEKKKEKEKEEQEERETK

SEQ ID NO: 426 - protein, 49 aa, Artificial Sequence
  Synthetic Peptide
ASSVPTAQPQAEGSLAKATTAPATTRNTGRGGEEKKKEKEKEEQEERET

SEQ ID NO: 427 - protein, 49 aa, Artificial Sequence
  Synthetic Peptide
QASSVPTAQPQAEGSLAKATTAPATTRNTGRGGEEKKKEKEKEEQEERE

SEQ ID NO: 428 - protein, 49 aa, Artificial Sequence
  Synthetic Peptide
AQASSVPTAQPQAEGSLAKATTAPATTRNTGRGGEEKKKEKEKEEQEER

SEQ ID NO: 429 - protein, 49 aa, Artificial Sequence
  Synthetic Peptide
KAQASSVPTAQPQAEGSLAKATTAPATTRNTGRGGEEKKKEKEKEEQEE

SEQ ID NO: 430 - protein, 49 aa, Artificial Sequence
  Synthetic Peptide
PKAQASSVPTAQPQAEGSLAKATTAPATTRNTGRGGEEKKKEKEKEEQE

SEQ ID NO: 431 - protein, 49 aa, Artificial Sequence
  Synthetic Peptide
SPKAQASSVPTAQPQAEGSLAKATTAPATTRNTGRGGEEKKKEKEKEEQ

SEQ ID NO: 432 - protein, 49 aa, Artificial Sequence
  Synthetic Peptide
ESPKAQASSVPTAQPQAEGSLAKATTAPATTRNTGRGGEEKKKEKEKEE

SEQ ID NO: 433 - protein, 49 aa, Artificial Sequence
  Synthetic Peptide
PESPKAQASSVPTAQPQAEGSLAKATTAPATTRNTGRGGEEKKKEKEKE

SEQ ID NO: 434 - protein, 49 aa, Artificial Sequence
  Synthetic Peptide
WPESPKAQASSVPTAQPQAEGSLAKATTAPATTRNTGRGGEEKKKEKEK

SEQ ID NO: 435 - protein, 49 aa, Artificial Sequence
  Synthetic Peptide
RWPESPKAQASSVPTAQPQAEGSLAKATTAPATTRNTGRGGEEKKKEKE

SEQ ID NO: 436 - protein, 48 aa, Artificial Sequence
  Synthetic Peptide
APATTRNTGRGGEEKKKEKEKEEQEERETKTPECPSHTQPLGVYLLTP

SEQ ID NO: 437 - protein, 48 aa, Artificial Sequence
  Synthetic Peptide
TAPATTRNTGRGGEEKKKEKEKEEQEERETKTPECPSHTQPLGVYLLT

SEQ ID NO: 438 - protein, 48 aa, Artificial Sequence
  Synthetic Peptide
TTAPATTRNTGRGGEEKKKEKEKEEQEERETKTPECPSHTQPLGVYLL

SEQ ID NO: 439 - protein, 48 aa, Artificial Sequence
  Synthetic Peptide
ATTAPATTRNTGRGGEEKKKEKEKEEQEERETKTPECPSHTQPLGVYL

SEQ ID NO: 440 - protein, 48 aa, Artificial Sequence
  Synthetic Peptide
KATTAPATTRNTGRGGEEKKKEKEKEEQEERETKTPECPSHTQPLGVY

SEQ ID NO: 441 - protein, 48 aa, Artificial Sequence
  Synthetic Peptide
AKATTAPATTRNTGRGGEEKKKEKEKEEQEERETKTPECPSHTQPLGV

SEQ ID NO: 442 - protein, 48 aa, Artificial Sequence
  Synthetic Peptide
LAKATTAPATTRNTGRGGEEKKKEKEKEEQEERETKTPECPSHTQPLG

SEQ ID NO: 443 - protein, 48 aa, Artificial Sequence
  Synthetic Peptide
SLAKATTAPATTRNTGRGGEEKKKEKEKEEQEERETKTPECPSHTQPL

SEQ ID NO: 444 - protein, 48 aa, Artificial Sequence
  Synthetic Peptide
GSLAKATTAPATTRNTGRGGEEKKKEKEKEEQEERETKTPECPSHTQP

SEQ ID NO: 445 - protein, 48 aa, Artificial Sequence
  Synthetic Peptide
EGSLAKATTAPATTRNTGRGGEEKKKEKEKEEQEERETKTPECPSHTQ

SEQ ID NO: 446 - protein, 48 aa, Artificial Sequence
  Synthetic Peptide
AEGSLAKATTAPATTRNTGRGGEEKKKEKEKEEQEERETKTPECPSHT

SEQ ID NO: 447 - protein, 48 aa, Artificial Sequence
  Synthetic Peptide
QAEGSLAKATTAPATTRNTGRGGEEKKKEKEKEEQEERETKTPECPSH

SEQ ID NO: 448 - protein, 48 aa, Artificial Sequence
  Synthetic Peptide
PQAEGSLAKATTAPATTRNTGRGGEEKKKEKEKEEQEERETKTPECPS

SEQ ID NO: 449 - protein, 48 aa, Artificial Sequence
  Synthetic Peptide
QPQAEGSLAKATTAPATTRNTGRGGEEKKKEKEKEEQEERETKTPECP

SEQ ID NO: 450 - protein, 48 aa, Artificial Sequence
  Synthetic Peptide
AQPQAEGSLAKATTAPATTRNTGRGGEEKKKEKEKEEQEERETKTPEC

SEQ ID NO: 451 - protein, 48 aa, Artificial Sequence
  Synthetic Peptide
TAQPQAEGSLAKATTAPATTRNTGRGGEEKKKEKEKEEQEERETKTPE

SEQ ID NO: 452 - protein, 48 aa, Artificial Sequence
  Synthetic Peptide
PTAQPQAEGSLAKATTAPATTRNTGRGGEEKKKEKEKEEQEERETKTP

SEQ ID NO: 453 - protein, 48 aa, Artificial Sequence
  Synthetic Peptide
VPTAQPQAEGSLAKATTAPATTRNTGRGGEEKKKEKEKEEQEERETKT

SEQ ID NO: 454 - protein, 48 aa, Artificial Sequence
  Synthetic Peptide
SVPTAQPQAEGSLAKATTAPATTRNTGRGGEEKKKEKEKEEQEERETK

SEQ ID NO: 455 - protein, 48 aa, Artificial Sequence
  Synthetic Peptide
SSVPTAQPQAEGSLAKATTAPATTRNTGRGGEEKKKEKEKEEQEERET

SEQ ID NO: 456 - protein, 48 aa, Artificial Sequence
  Synthetic Peptide
ASSVPTAQPQAEGSLAKATTAPATTRNTGRGGEEKKKEKEKEEQEERE

SEQ ID NO: 457 - protein, 48 aa, Artificial Sequence
  Synthetic Peptide
QASSVPTAQPQAEGSLAKATTAPATTRNTGRGGEEKKKEKEKEEQEER

SEQ ID NO: 458 - protein, 48 aa, Artificial Sequence
  Synthetic Peptide
AQASSVPTAQPQAEGSLAKATTAPATTRNTGRGGEEKKKEKEKEEQEE

SEQ ID NO: 459 - protein, 48 aa, Artificial Sequence
  Synthetic Peptide
KAQASSVPTAQPQAEGSLAKATTAPATTRNTGRGGEEKKKEKEKEEQE

SEQ ID NO: 460 - protein, 48 aa, Artificial Sequence
  Synthetic Peptide
PKAQASSVPTAQPQAEGSLAKATTAPATTRNTGRGGEEKKKEKEKEEQ

SEQ ID NO: 461 - protein, 48 aa, Artificial Sequence
  Synthetic Peptide
SPKAQASSVPTAQPQAEGSLAKATTAPATTRNTGRGGEEKKKEKEKEE

SEQ ID NO: 462 - protein, 48 aa, Artificial Sequence
  Synthetic Peptide
ESPKAQASSVPTAQPQAEGSLAKATTAPATTRNTGRGGEEKKKEKEKE

SEQ ID NO: 463 - protein, 48 aa, Artificial Sequence
  Synthetic Peptide
PESPKAQASSVPTAQPQAEGSLAKATTAPATTRNTGRGGEEKKKEKEK

SEQ ID NO: 464 - protein, 48 aa, Artificial Sequence
  Synthetic Peptide
WPESPKAQASSVPTAQPQAEGSLAKATTAPATTRNTGRGGEEKKKEKE

SEQ ID NO: 465 - protein, 48 aa, Artificial Sequence
  Synthetic Peptide
RWPESPKAQASSVPTAQPQAEGSLAKATTAPATTRNTGRGGEEKKKEK

SEQ ID NO: 466 - protein, 47 aa, Artificial Sequence
  Synthetic Peptide
PATTRNTGRGGEEKKKEKEKEEQEERETKTPECPSHTQPLGVYLLTP

SEQ ID NO: 467 - protein, 47 aa, Artificial Sequence
  Synthetic Peptide
APATTRNTGRGGEEKKKEKEKEEQEERETKTPECPSHTQPLGVYLLT

SEQ ID NO: 468 - protein, 47 aa, Artificial Sequence
  Synthetic Peptide
TAPATTRNTGRGGEEKKKEKEKEEQEERETKTPECPSHTQPLGVYLL

SEQ ID NO: 469 - protein, 47 aa, Artificial Sequence
  Synthetic Peptide
TTAPATTRNTGRGGEEKKKEKEKEEQEERETKTPECPSHTQPLGVYL

SEQ ID NO: 470 - protein, 47 aa, Artificial Sequence
  Synthetic Peptide
ATTAPATTRNTGRGGEEKKKEKEKEEQEERETKTPECPSHTQPLGVY

SEQ ID NO: 471 - protein, 47 aa, Artificial Sequence
  Synthetic Peptide
KATTAPATTRNTGRGGEEKKKEKEKEEQEERETKTPECPSHTQPLGV

SEQ ID NO: 472 - protein, 47 aa, Artificial Sequence
  Synthetic Peptide
AKATTAPATTRNTGRGGEEKKKEKEKEEQEERETKTPECPSHTQPLG

SEQ ID NO: 473 - protein, 47 aa, Artificial Sequence
  Synthetic Peptide
LAKATTAPATTRNTGRGGEEKKKEKEKEEQEERETKTPECPSHTQPL

SEQ ID NO: 474 - protein, 47 aa, Artificial Sequence
  Synthetic Peptide
SLAKATTAPATTRNTGRGGEEKKKEKEKEEQEERETKTPECPSHTQP

SEQ ID NO: 475 - protein, 47 aa, Artificial Sequence
  Synthetic Peptide
GSLAKATTAPATTRNTGRGGEEKKKEKEKEEQEERETKTPECPSHTQ

SEQ ID NO: 476 - protein, 47 aa, Artificial Sequence
  Synthetic Peptide
EGSLAKATTAPATTRNTGRGGEEKKKEKEKEEQEERETKTPECPSHT

SEQ ID NO: 477 - protein, 47 aa, Artificial Sequence
  Synthetic Peptide
AEGSLAKATTAPATTRNTGRGGEEKKKEKEKEEQEERETKTPECPSH

SEQ ID NO: 478 - protein, 47 aa, Artificial Sequence
  Synthetic Peptide
QAEGSLAKATTAPATTRNTGRGGEEKKKEKEKEEQEERETKTPECPS

SEQ ID NO: 479 - protein, 47 aa, Artificial Sequence
  Synthetic Peptide
PQAEGSLAKATTAPATTRNTGRGGEEKKKEKEKEEQEERETKTPECP

SEQ ID NO: 480 - protein, 47 aa, Artificial Sequence
  Synthetic Peptide
QPQAEGSLAKATTAPATTRNTGRGGEEKKKEKEKEEQEERETKTPEC

SEQ ID NO: 481 - protein, 47 aa, Artificial Sequence
  Synthetic Peptide
AQPQAEGSLAKATTAPATTRNTGRGGEEKKKEKEKEEQEERETKTPE

SEQ ID NO: 482 - protein, 47 aa, Artificial Sequence
  Synthetic Peptide
TAQPQAEGSLAKATTAPATTRNTGRGGEEKKKEKEKEEQEERETKTP

SEQ ID NO: 483 - protein, 47 aa, Artificial Sequence
  Synthetic Peptide
PTAQPQAEGSLAKATTAPATTRNTGRGGEEKKKEKEKEEQEERETKT

SEQ ID NO: 484 - protein, 47 aa, Artificial Sequence
  Synthetic Peptide
VPTAQPQAEGSLAKATTAPATTRNTGRGGEEKKKEKEKEEQEERETK

SEQ ID NO: 485 - protein, 47 aa, Artificial Sequence
  Synthetic Peptide
SVPTAQPQAEGSLAKATTAPATTRNTGRGGEEKKKEKEKEEQEERET

SEQ ID NO: 486 - protein, 47 aa, Artificial Sequence
  Synthetic Peptide
SSVPTAQPQAEGSLAKATTAPATTRNTGRGGEEKKKEKEKEEQEERE

SEQ ID NO: 487 - protein, 47 aa, Artificial Sequence
  Synthetic Peptide
ASSVPTAQPQAEGSLAKATTAPATTRNTGRGGEEKKKEKEKEEQEER

SEQ ID NO: 488 - protein, 47 aa, Artificial Sequence
  Synthetic Peptide
QASSVPTAQPQAEGSLAKATTAPATTRNTGRGGEEKKKEKEKEEQEE

SEQ ID NO: 489 - protein, 47 aa, Artificial Sequence
  Synthetic Peptide
AQASSVPTAQPQAEGSLAKATTAPATTRNTGRGGEEKKKEKEKEEQE

SEQ ID NO: 490 - protein, 47 aa, Artificial Sequence
  Synthetic Peptide
KAQASSVPTAQPQAEGSLAKATTAPATTRNTGRGGEEKKKEKEKEEQ

SEQ ID NO: 491 - protein, 47 aa, Artificial Sequence
  Synthetic Peptide
PKAQASSVPTAQPQAEGSLAKATTAPATTRNTGRGGEEKKKEKEKEE

SEQ ID NO: 492 - protein, 47 aa, Artificial Sequence
  Synthetic Peptide
SPKAQASSVPTAQPQAEGSLAKATTAPATTRNTGRGGEEKKKEKEKE

SEQ ID NO: 493 - protein, 47 aa, Artificial Sequence
  Synthetic Peptide
ESPKAQASSVPTAQPQAEGSLAKATTAPATTRNTGRGGEEKKKEKEK

SEQ ID NO: 494 - protein, 47 aa, Artificial Sequence
  Synthetic Peptide
PESPKAQASSVPTAQPQAEGSLAKATTAPATTRNTGRGGEEKKKEKE

SEQ ID NO: 495 - protein, 47 aa, Artificial Sequence
  Synthetic Peptide
WPESPKAQASSVPTAQPQAEGSLAKATTAPATTRNTGRGGEEKKKEK

SEQ ID NO: 496 - protein, 47 aa, Artificial Sequence
  Synthetic Peptide
RWPESPKAQASSVPTAQPQAEGSLAKATTAPATTRNTGRGGEEKKKE

SEQ ID NO: 497 - protein, 46 aa, Artificial Sequence
  Synthetic Peptide
ATTRNTGRGGEEKKKEKEKEEQEERETKTPECPSHTQPLGVYLLTP

SEQ ID NO: 498 - protein, 46 aa, Artificial Sequence
  Synthetic Peptide
PATTRNTGRGGEEKKKEKEKEEQEERETKTPECPSHTQPLGVYLLT

SEQ ID NO: 499 - protein, 46 aa, Artificial Sequence
  Synthetic Peptide
APATTRNTGRGGEEKKKEKEKEEQEERETKTPECPSHTQPLGVYLL

SEQ ID NO: 500 - protein, 46 aa, Artificial Sequence
  Synthetic Peptide
TAPATTRNTGRGGEEKKKEKEKEEQEERETKTPECPSHTQPLGVYL

SEQ ID NO: 501 - protein, 46 aa, Artificial Sequence
  Synthetic Peptide
TTAPATTRNTGRGGEEKKKEKEKEEQEERETKTPECPSHTQPLGVY

SEQ ID NO: 502 - protein, 46 aa, Artificial Sequence
  Synthetic Peptide
ATTAPATTRNTGRGGEEKKKEKEKEEQEERETKTPECPSHTQPLGV

SEQ ID NO: 503 - protein, 46 aa, Artificial Sequence
  Synthetic Peptide
KATTAPATTRNTGRGGEEKKKEKEKEEQEERETKTPECPSHTQPLG

SEQ ID NO: 504 - protein, 46 aa, Artificial Sequence
  Synthetic Peptide
AKATTAPATTRNTGRGGEEKKKEKEKEEQEERETKTPECPSHTQPL

SEQ ID NO: 505 - protein, 46 aa, Artificial Sequence
  Synthetic Peptide
LAKATTAPATTRNTGRGGEEKKKEKEKEEQEERETKTPECPSHTQP

SEQ ID NO: 506 - protein, 46 aa, Artificial Sequence
  Synthetic Peptide
SLAKATTAPATTRNTGRGGEEKKKEKEKEEQEERETKTPECPSHTQ

SEQ ID NO: 507 - protein, 46 aa, Artificial Sequence
  Synthetic Peptide
GSLAKATTAPATTRNTGRGGEEKKKEKEKEEQEERETKTPECPSHT

SEQ ID NO: 508 - protein, 46 aa, Artificial Sequence
  Synthetic Peptide
EGSLAKATTAPATTRNTGRGGEEKKKEKEKEEQEERETKTPECPSH

SEQ ID NO: 509 - protein, 46 aa, Artificial Sequence
  Synthetic Peptide
AEGSLAKATTAPATTRNTGRGGEEKKKEKEKEEQEERETKTPECPS

SEQ ID NO: 510 - protein, 46 aa, Artificial Sequence
  Synthetic Peptide
QAEGSLAKATTAPATTRNTGRGGEEKKKEKEKEEQEERETKTPECP

SEQ ID NO: 511 - protein, 46 aa, Artificial Sequence
  Synthetic Peptide
PQAEGSLAKATTAPATTRNTGRGGEEKKKEKEKEEQEERETKTPEC

SEQ ID NO: 512 - protein, 46 aa, Artificial Sequence
  Synthetic Peptide
QPQAEGSLAKATTAPATTRNTGRGGEEKKKEKEKEEQEERETKTPE

SEQ ID NO: 513 - protein, 46 aa, Artificial Sequence
  Synthetic Peptide
AQPQAEGSLAKATTAPATTRNTGRGGEEKKKEKEKEEQEERETKTP

SEQ ID NO: 514 - protein, 46 aa, Artificial Sequence
  Synthetic Peptide
TAQPQAEGSLAKATTAPATTRNTGRGGEEKKKEKEKEEQEERETKT

SEQ ID NO: 515 - protein, 46 aa, Artificial Sequence
  Synthetic Peptide
PTAQPQAEGSLAKATTAPATTRNTGRGGEEKKKEKEKEEQEERETK

SEQ ID NO: 516 - protein, 46 aa, Artificial Sequence
  Synthetic Peptide
VPTAQPQAEGSLAKATTAPATTRNTGRGGEEKKKEKEKEEQEERET

SEQ ID NO: 517 - protein, 46 aa, Artificial Sequence
  Synthetic Peptide
SVPTAQPQAEGSLAKATTAPATTRNTGRGGEEKKKEKEKEEQEERE

SEQ ID NO: 518 - protein, 46 aa, Artificial Sequence
  Synthetic Peptide
SSVPTAQPQAEGSLAKATTAPATTRNTGRGGEEKKKEKEKEEQEER

SEQ ID NO: 519 - protein, 46 aa, Artificial Sequence
  Synthetic Peptide
ASSVPTAQPQAEGSLAKATTAPATTRNTGRGGEEKKKEKEKEEQEE

SEQ ID NO: 520 - protein, 46 aa, Artificial Sequence
  Synthetic Peptide
QASSVPTAQPQAEGSLAKATTAPATTRNTGRGGEEKKKEKEKEEQE

SEQ ID NO: 521 - protein, 46 aa, Artificial Sequence
  Synthetic Peptide
AQASSVPTAQPQAEGSLAKATTAPATTRNTGRGGEEKKKEKEKEEQ

SEQ ID NO: 522 - protein, 46 aa, Artificial Sequence
  Synthetic Peptide
KAQASSVPTAQPQAEGSLAKATTAPATTRNTGRGGEEKKKEKEKEE

SEQ ID NO: 523 - protein, 46 aa, Artificial Sequence
  Synthetic Peptide
PKAQASSVPTAQPQAEGSLAKATTAPATTRNTGRGGEEKKKEKEKE

SEQ ID NO: 524 - protein, 46 aa, Artificial Sequence
  Synthetic Peptide
SPKAQASSVPTAQPQAEGSLAKATTAPATTRNTGRGGEEKKKEKEK

SEQ ID NO: 525 - protein, 46 aa, Artificial Sequence
  Synthetic Peptide
ESPKAQASSVPTAQPQAEGSLAKATTAPATTRNTGRGGEEKKKEKE

SEQ ID NO: 526 - protein, 46 aa, Artificial Sequence
  Synthetic Peptide
PESPKAQASSVPTAQPQAEGSLAKATTAPATTRNTGRGGEEKKKEK

SEQ ID NO: 527 - protein, 46 aa, Artificial Sequence
  Synthetic Peptide
RWPESPKAQASSVPTAQPQAEGSLAKATTAPATTRNTGRGGEEKKK

SEQ ID NO: 528 - protein, 46 aa, Artificial Sequence
  Synthetic Peptide
WPESPKAQASSVPTAQPQAEGSLAKATTAPATTRNTGRGGEEKKKE

SEQ ID NO: 529 - protein, 45 aa, Artificial Sequence
  Synthetic Peptide
TTRNTGRGGEEKKKEKEKEEQEERETKTPECPSHTQPLGVYLLTP

SEQ ID NO: 530 - protein, 45 aa, Artificial Sequence
  Synthetic Peptide
ATTRNTGRGGEEKKKEKEKEEQEERETKTPECPSHTQPLGVYLLT

SEQ ID NO: 531 - protein, 45 aa, Artificial Sequence
  Synthetic Peptide
PATTRNTGRGGEEKKKEKEKEEQEERETKTPECPSHTQPLGVYLL

SEQ ID NO: 532 - protein, 45 aa, Artificial Sequence
  Synthetic Peptide
APATTRNTGRGGEEKKKEKEKEEQEERETKTPECPSHTQPLGVYL

SEQ ID NO: 533 - protein, 45 aa, Artificial Sequence
  Synthetic Peptide
TAPATTRNTGRGGEEKKKEKEKEEQEERETKTPECPSHTQPLGVY

SEQ ID NO: 534 - protein, 45 aa, Artificial Sequence
  Synthetic Peptide
TTAPATTRNTGRGGEEKKKEKEKEEQEERETKTPECPSHTQPLGV

SEQ ID NO: 535 - protein, 45 aa, Artificial Sequence
  Synthetic Peptide
ATTAPATTRNTGRGGEEKKKEKEKEEQEERETKTPECPSHTQPLG

SEQ ID NO: 536 - protein, 45 aa, Artificial Sequence
  Synthetic Peptide
KATTAPATTRNTGRGGEEKKKEKEKEEQEERETKTPECPSHTQPL

SEQ ID NO: 537 - protein, 45 aa, Artificial Sequence
  Synthetic Peptide
AKATTAPATTRNTGRGGEEKKKEKEKEEQEERETKTPECPSHTQP

SEQ ID NO: 538 - protein, 45 aa, Artificial Sequence
  Synthetic Peptide
LAKATTAPATTRNTGRGGEEKKKEKEKEEQEERETKTPECPSHTQ

SEQ ID NO: 539 - protein, 45 aa, Artificial Sequence
  Synthetic Peptide
SLAKATTAPATTRNTGRGGEEKKKEKEKEEQEERETKTPECPSHT

SEQ ID NO: 540 - protein, 45 aa, Artificial Sequence
  Synthetic Peptide
GSLAKATTAPATTRNTGRGGEEKKKEKEKEEQEERETKTPECPSH

SEQ ID NO: 541 - protein, 45 aa, Artificial Sequence
  Synthetic Peptide
EGSLAKATTAPATTRNTGRGGEEKKKEKEKEEQEERETKTPECPS

SEQ ID NO: 542 - protein, 45 aa, Artificial Sequence
  Synthetic Peptide
AEGSLAKATTAPATTRNTGRGGEEKKKEKEKEEQEERETKTPECP

SEQ ID NO: 543 - protein, 45 aa, Artificial Sequence
  Synthetic Peptide
QAEGSLAKATTAPATTRNTGRGGEEKKKEKEKEEQEERETKTPEC

SEQ ID NO: 544 - protein, 45 aa, Artificial Sequence
  Synthetic Peptide
PQAEGSLAKATTAPATTRNTGRGGEEKKKEKEKEEQEERETKTPE

SEQ ID NO: 545 - protein, 45 aa, Artificial Sequence
  Synthetic Peptide
QPQAEGSLAKATTAPATTRNTGRGGEEKKKEKEKEEQEERETKTP

SEQ ID NO: 546 - protein, 45 aa, Artificial Sequence
  Synthetic Peptide
AQPQAEGSLAKATTAPATTRNTGRGGEEKKKEKEKEEQEERETKT

SEQ ID NO: 547 - protein, 45 aa, Artificial Sequence
  Synthetic Peptide
TAQPQAEGSLAKATTAPATTRNTGRGGEEKKKEKEKEEQEERETK

SEQ ID NO: 548 - protein, 45 aa, Artificial Sequence
  Synthetic Peptide
PTAQPQAEGSLAKATTAPATTRNTGRGGEEKKKEKEKEEQEERET

SEQ ID NO: 549 - protein, 45 aa, Artificial Sequence
  Synthetic Peptide
VPTAQPQAEGSLAKATTAPATTRNTGRGGEEKKKEKEKEEQEERE

SEQ ID NO: 550 - protein, 45 aa, Artificial Sequence
  Synthetic Peptide
SVPTAQPQAEGSLAKATTAPATTRNTGRGGEEKKKEKEKEEQEER

SEQ ID NO: 551 - protein, 45 aa, Artificial Sequence
  Synthetic Peptide
SSVPTAQPQAEGSLAKATTAPATTRNTGRGGEEKKKEKEKEEQEE

SEQ ID NO: 552 - protein, 45 aa, Artificial Sequence
  Synthetic Peptide
ASSVPTAQPQAEGSLAKATTAPATTRNTGRGGEEKKKEKEKEEQE

SEQ ID NO: 553 - protein, 45 aa, Artificial Sequence
  Synthetic Peptide
QASSVPTAQPQAEGSLAKATTAPATTRNTGRGGEEKKKEKEKEEQ

SEQ ID NO: 554 - protein, 45 aa, Artificial Sequence
  Synthetic Peptide
AQASSVPTAQPQAEGSLAKATTAPATTRNTGRGGEEKKKEKEKEE

SEQ ID NO: 555 - protein, 45 aa, Artificial Sequence
  Synthetic Peptide
KAQASSVPTAQPQAEGSLAKATTAPATTRNTGRGGEEKKKEKEKE

SEQ ID NO: 556 - protein, 45 aa, Artificial Sequence
  Synthetic Peptide
PKAQASSVPTAQPQAEGSLAKATTAPATTRNTGRGGEEKKKEKEK

SEQ ID NO: 557 - protein, 45 aa, Artificial Sequence
  Synthetic Peptide
SPKAQASSVPTAQPQAEGSLAKATTAPATTRNTGRGGEEKKKEKE

SEQ ID NO: 558 - protein, 45 aa, Artificial Sequence
  Synthetic Peptide
ESPKAQASSVPTAQPQAEGSLAKATTAPATTRNTGRGGEEKKKEK

SEQ ID NO: 559 - protein, 45 aa, Artificial Sequence
  Synthetic Peptide
PESPKAQASSVPTAQPQAEGSLAKATTAPATTRNTGRGGEEKKKE

SEQ ID NO: 560 - protein, 45 aa, Artificial Sequence
  Synthetic Peptide
WPESPKAQASSVPTAQPQAEGSLAKATTAPATTRNTGRGGEEKKK

SEQ ID NO: 561 - protein, 45 aa, Artificial Sequence
  Synthetic Peptide
RWPESPKAQASSVPTAQPQAEGSLAKATTAPATTRNTGRGGEEKK

SEQ ID NO: 562 - protein, 44 aa, Artificial Sequence
  Synthetic Peptide
TRNTGRGGEEKKKEKEKEEQEERETKTPECPSHTQPLGVYLLTP

SEQ ID NO: 563 - protein, 44 aa, Artificial Sequence
  Synthetic Peptide
TTRNTGRGGEEKKKEKEKEEQEERETKTPECPSHTQPLGVYLLT

SEQ ID NO: 564 - protein, 44 aa, Artificial Sequence
  Synthetic Peptide
ATTRNTGRGGEEKKKEKEKEEQEERETKTPECPSHTQPLGVYLL

SEQ ID NO: 565 - protein, 44 aa, Artificial Sequence
  Synthetic Peptide
PATTRNTGRGGEEKKKEKEKEEQEERETKTPECPSHTQPLGVYL

SEQ ID NO: 566 - protein, 44 aa, Artificial Sequence
  Synthetic Peptide
APATTRNTGRGGEEKKKEKEKEEQEERETKTPECPSHTQPLGVY

SEQ ID NO: 567 - protein, 44 aa, Artificial Sequence
  Synthetic Peptide
TAPATTRNTGRGGEEKKKEKEKEEQEERETKTPECPSHTQPLGV

SEQ ID NO: 568 - protein, 44 aa, Artificial Sequence
  Synthetic Peptide
TTAPATTRNTGRGGEEKKKEKEKEEQEERETKTPECPSHTQPLG

SEQ ID NO: 569 - protein, 44 aa, Artificial Sequence
  Synthetic Peptide
ATTAPATTRNTGRGGEEKKKEKEKEEQEERETKTPECPSHTQPL

SEQ ID NO: 570 - protein, 44 aa, Artificial Sequence
  Synthetic Peptide
KATTAPATTRNTGRGGEEKKKEKEKEEQEERETKTPECPSHTQP

SEQ ID NO: 571 - protein, 44 aa, Artificial Sequence
  Synthetic Peptide
AKATTAPATTRNTGRGGEEKKKEKEKEEQEERETKTPECPSHTQ

SEQ ID NO: 572 - protein, 44 aa, Artificial Sequence
  Synthetic Peptide
LAKATTAPATTRNTGRGGEEKKKEKEKEEQEERETKTPECPSHT

SEQ ID NO: 573 - protein, 44 aa, Artificial Sequence
  Synthetic Peptide
SLAKATTAPATTRNTGRGGEEKKKEKEKEEQEERETKTPECPSH

SEQ ID NO: 574 - protein, 44 aa, Artificial Sequence
  Synthetic Peptide
GSLAKATTAPATTRNTGRGGEEKKKEKEKEEQEERETKTPECPS

SEQ ID NO: 575 - protein, 44 aa, Artificial Sequence
  Synthetic Peptide
EGSLAKATTAPATTRNTGRGGEEKKKEKEKEEQEERETKTPECP

SEQ ID NO: 576 - protein, 44 aa, Artificial Sequence
  Synthetic Peptide
AEGSLAKATTAPATTRNTGRGGEEKKKEKEKEEQEERETKTPEC

SEQ ID NO: 577 - protein, 44 aa, Artificial Sequence
  Synthetic Peptide
QAEGSLAKATTAPATTRNTGRGGEEKKKEKEKEEQEERETKTPE

SEQ ID NO: 578 - protein, 44 aa, Artificial Sequence
  Synthetic Peptide
PQAEGSLAKATTAPATTRNTGRGGEEKKKEKEKEEQEERETKTP

SEQ ID NO: 579 - protein, 44 aa, Artificial Sequence
  Synthetic Peptide
QPQAEGSLAKATTAPATTRNTGRGGEEKKKEKEKEEQEERETKT

SEQ ID NO: 580 - protein, 44 aa, Artificial Sequence
  Synthetic Peptide
AQPQAEGSLAKATTAPATTRNTGRGGEEKKKEKEKEEQEERETK

SEQ ID NO: 581 - protein, 44 aa, Artificial Sequence
  Synthetic Peptide
TAQPQAEGSLAKATTAPATTRNTGRGGEEKKKEKEKEEQEERET

SEQ ID NO: 582 - protein, 44 aa, Artificial Sequence
  Synthetic Peptide
PTAQPQAEGSLAKATTAPATTRNTGRGGEEKKKEKEKEEQEERE

SEQ ID NO: 583 - protein, 44 aa, Artificial Sequence
  Synthetic Peptide
VPTAQPQAEGSLAKATTAPATTRNTGRGGEEKKKEKEKEEQEER

SEQ ID NO: 584 - protein, 44 aa, Artificial Sequence
  Synthetic Peptide
SVPTAQPQAEGSLAKATTAPATTRNTGRGGEEKKKEKEKEEQEE

SEQ ID NO: 585 - protein, 44 aa, Artificial Sequence
  Synthetic Peptide
SSVPTAQPQAEGSLAKATTAPATTRNTGRGGEEKKKEKEKEEQE

SEQ ID NO: 586 - protein, 44 aa, Artificial Sequence
  Synthetic Peptide
ASSVPTAQPQAEGSLAKATTAPATTRNTGRGGEEKKKEKEKEEQ

SEQ ID NO: 587 - protein, 44 aa, Artificial Sequence
  Synthetic Peptide
QASSVPTAQPQAEGSLAKATTAPATTRNTGRGGEEKKKEKEKEE

SEQ ID NO: 588 - protein, 44 aa, Artificial Sequence
  Synthetic Peptide
AQASSVPTAQPQAEGSLAKATTAPATTRNTGRGGEEKKKEKEKE

SEQ ID NO: 589 - protein, 44 aa, Artificial Sequence
  Synthetic Peptide
KAQASSVPTAQPQAEGSLAKATTAPATTRNTGRGGEEKKKEKEK

SEQ ID NO: 590 - protein, 44 aa, Artificial Sequence
  Synthetic Peptide
PKAQASSVPTAQPQAEGSLAKATTAPATTRNTGRGGEEKKKEKE

SEQ ID NO: 591 - protein, 44 aa, Artificial Sequence
  Synthetic Peptide
SPKAQASSVPTAQPQAEGSLAKATTAPATTRNTGRGGEEKKKEK

SEQ ID NO: 592 - protein, 44 aa, Artificial Sequence
  Synthetic Peptide
ESPKAQASSVPTAQPQAEGSLAKATTAPATTRNTGRGGEEKKKE

SEQ ID NO: 593 - protein, 44 aa, Artificial Sequence
  Synthetic Peptide
PESPKAQASSVPTAQPQAEGSLAKATTAPATTRNTGRGGEEKKK

SEQ ID NO: 594 - protein, 44 aa, Artificial Sequence
  Synthetic Peptide
RWPESPKAQASSVPTAQPQAEGSLAKATTAPATTRNTGRGGEEK

SEQ ID NO: 595 - protein, 44 aa, Artificial Sequence
  Synthetic Peptide
WPESPKAQASSVPTAQPQAEGSLAKATTAPATTRNTGRGGEEKK

SEQ ID NO: 596 - protein, 43 aa, Artificial Sequence
  Synthetic Peptide
RNTGRGGEEKKKEKEKEEQEERETKTPECPSHTQPLGVYLLTP

SEQ ID NO: 597 - protein, 43 aa, Artificial Sequence
  Synthetic Peptide
TRNTGRGGEEKKKEKEKEEQEERETKTPECPSHTQPLGVYLLT

SEQ ID NO: 598 - protein, 43 aa, Artificial Sequence
  Synthetic Peptide
TTRNTGRGGEEKKKEKEKEEQEERETKTPECPSHTQPLGVYLL

SEQ ID NO: 599 - protein, 43 aa, Artificial Sequence
  Synthetic Peptide
ATTRNTGRGGEEKKKEKEKEEQEERETKTPECPSHTQPLGVYL

SEQ ID NO: 600 - protein, 43 aa, Artificial Sequence
  Synthetic Peptide
PATTRNTGRGGEEKKKEKEKEEQEERETKTPECPSHTQPLGVY

SEQ ID NO: 601 - protein, 43 aa, Artificial Sequence
  Synthetic Peptide
APATTRNTGRGGEEKKKEKEKEEQEERETKTPECPSHTQPLGV

SEQ ID NO: 602 - protein, 43 aa, Artificial Sequence
  Synthetic Peptide
TAPATTRNTGRGGEEKKKEKEKEEQEERETKTPECPSHTQPLG

SEQ ID NO: 603 - protein, 43 aa, Artificial Sequence
  Synthetic Peptide
TTAPATTRNTGRGGEEKKKEKEKEEQEERETKTPECPSHTQPL

SEQ ID NO: 604 - protein, 43 aa, Artificial Sequence
  Synthetic Peptide
ATTAPATTRNTGRGGEEKKKEKEKEEQEERETKTPECPSHTQP

SEQ ID NO: 605 - protein, 43 aa, Artificial Sequence
  Synthetic Peptide
KATTAPATTRNTGRGGEEKKKEKEKEEQEERETKTPECPSHTQ

SEQ ID NO: 606 - protein, 43 aa, Artificial Sequence
  Synthetic Peptide
AKATTAPATTRNTGRGGEEKKKEKEKEEQEERETKTPECPSHT

SEQ ID NO: 607 - protein, 43 aa, Artificial Sequence
  Synthetic Peptide
LAKATTAPATTRNTGRGGEEKKKEKEKEEQEERETKTPECPSH

SEQ ID NO: 608 - protein, 43 aa, Artificial Sequence
  Synthetic Peptide
SLAKATTAPATTRNTGRGGEEKKKEKEKEEQEERETKTPECPS

SEQ ID NO: 609 - protein, 43 aa, Artificial Sequence
  Synthetic Peptide
GSLAKATTAPATTRNTGRGGEEKKKEKEKEEQEERETKTPECP

SEQ ID NO: 610 - protein, 43 aa, Artificial Sequence
  Synthetic Peptide
EGSLAKATTAPATTRNTGRGGEEKKKEKEKEEQEERETKTPEC

SEQ ID NO: 611 - protein, 43 aa, Artificial Sequence
  Synthetic Peptide
AEGSLAKATTAPATTRNTGRGGEEKKKEKEKEEQEERETKTPE

SEQ ID NO: 612 - protein, 43 aa, Artificial Sequence
  Synthetic Peptide
QAEGSLAKATTAPATTRNTGRGGEEKKKEKEKEEQEERETKTP

SEQ ID NO: 613 - protein, 43 aa, Artificial Sequence
  Synthetic Peptide
PQAEGSLAKATTAPATTRNTGRGGEEKKKEKEKEEQEERETKT

SEQ ID NO: 614 - protein, 43 aa, Artificial Sequence
  Synthetic Peptide
QPQAEGSLAKATTAPATTRNTGRGGEEKKKEKEKEEQEERETK

SEQ ID NO: 615 - protein, 43 aa, Artificial Sequence
  Synthetic Peptide
AQPQAEGSLAKATTAPATTRNTGRGGEEKKKEKEKEEQEERET

SEQ ID NO: 616 - protein, 43 aa, Artificial Sequence
  Synthetic Peptide
TAQPQAEGSLAKATTAPATTRNTGRGGEEKKKEKEKEEQEERE

SEQ ID NO: 617 - protein, 43 aa, Artificial Sequence
  Synthetic Peptide
PTAQPQAEGSLAKATTAPATTRNTGRGGEEKKKEKEKEEQEER

SEQ ID NO: 618 - protein, 43 aa, Artificial Sequence
  Synthetic Peptide
VPTAQPQAEGSLAKATTAPATTRNTGRGGEEKKKEKEKEEQEE

SEQ ID NO: 619 - protein, 43 aa, Artificial Sequence
  Synthetic Peptide
SVPTAQPQAEGSLAKATTAPATTRNTGRGGEEKKKEKEKEEQE

SEQ ID NO: 620 - protein, 43 aa, Artificial Sequence
  Synthetic Peptide
SSVPTAQPQAEGSLAKATTAPATTRNTGRGGEEKKKEKEKEEQ

SEQ ID NO: 621 - protein, 43 aa, Artificial Sequence
  Synthetic Peptide
ASSVPTAQPQAEGSLAKATTAPATTRNTGRGGEEKKKEKEKEE

SEQ ID NO: 622 - protein, 43 aa, Artificial Sequence
  Synthetic Peptide
QASSVPTAQPQAEGSLAKATTAPATTRNTGRGGEEKKKEKEKE

SEQ ID NO: 623 - protein, 43 aa, Artificial Sequence
  Synthetic Peptide
AQASSVPTAQPQAEGSLAKATTAPATTRNTGRGGEEKKKEKEK

SEQ ID NO: 624 - protein, 43 aa, Artificial Sequence
  Synthetic Peptide
KAQASSVPTAQPQAEGSLAKATTAPATTRNTGRGGEEKKKEKE

SEQ ID NO: 625 - protein, 43 aa, Artificial Sequence
  Synthetic Peptide
PKAQASSVPTAQPQAEGSLAKATTAPATTRNTGRGGEEKKKEK

SEQ ID NO: 626 - protein, 43 aa, Artificial Sequence
  Synthetic Peptide
SPKAQASSVPTAQPQAEGSLAKATTAPATTRNTGRGGEEKKKE

SEQ ID NO: 627 - protein, 43 aa, Artificial Sequence
  Synthetic Peptide
ESPKAQASSVPTAQPQAEGSLAKATTAPATTRNTGRGGEEKKK

SEQ ID NO: 628 - protein, 43 aa, Artificial Sequence
  Synthetic Peptide
PESPKAQASSVPTAQPQAEGSLAKATTAPATTRNTGRGGEEKK

SEQ ID NO: 629 - protein, 43 aa, Artificial Sequence
  Synthetic Peptide
WPESPKAQASSVPTAQPQAEGSLAKATTAPATTRNTGRGGEEK

SEQ ID NO: 630 - protein, 43 aa, Artificial Sequence
  Synthetic Peptide
RWPESPKAQASSVPTAQPQAEGSLAKATTAPATTRNTGRGGEE

SEQ ID NO: 631 - protein, 42 aa, Artificial Sequence
  Synthetic Peptide
NTGRGGEEKKKEKEKEEQEERETKTPECPSHTQPLGVYLLTP

SEQ ID NO: 632 - protein, 42 aa, Artificial Sequence
  Synthetic Peptide
RNTGRGGEEKKKEKEKEEQEERETKTPECPSHTQPLGVYLLT

SEQ ID NO: 633 - protein, 42 aa, Artificial Sequence
  Synthetic Peptide
TRNTGRGGEEKKKEKEKEEQEERETKTPECPSHTQPLGVYLL

SEQ ID NO: 634 - protein, 42 aa, Artificial Sequence
  Synthetic Peptide
TTRNTGRGGEEKKKEKEKEEQEERETKTPECPSHTQPLGVYL

SEQ ID NO: 635 - protein, 42 aa, Artificial Sequence
  Synthetic Peptide
ATTRNTGRGGEEKKKEKEKEEQEERETKTPECPSHTQPLGVY

SEQ ID NO: 636 - protein, 42 aa, Artificial Sequence
  Synthetic Peptide
PATTRNTGRGGEEKKKEKEKEEQEERETKTPECPSHTQPLGV

SEQ ID NO: 637 - protein, 42 aa, Artificial Sequence
  Synthetic Peptide
APATTRNTGRGGEEKKKEKEKEEQEERETKTPECPSHTQPLG

SEQ ID NO: 638 - protein, 42 aa, Artificial Sequence
  Synthetic Peptide
TAPATTRNTGRGGEEKKKEKEKEEQEERETKTPECPSHTQPL

SEQ ID NO: 639 - protein, 42 aa, Artificial Sequence
  Synthetic Peptide
TTAPATTRNTGRGGEEKKKEKEKEEQEERETKTPECPSHTQP

SEQ ID NO: 640 - protein, 42 aa, Artificial Sequence
  Synthetic Peptide
ATTAPATTRNTGRGGEEKKKEKEKEEQEERETKTPECPSHTQ

SEQ ID NO: 641 - protein, 42 aa, Artificial Sequence
  Synthetic Peptide
KATTAPATTRNTGRGGEEKKKEKEKEEQEERETKTPECPSHT

SEQ ID NO: 642 - protein, 42 aa, Artificial Sequence
  Synthetic Peptide
AKATTAPATTRNTGRGGEEKKKEKEKEEQEERETKTPECPSH

SEQ ID NO: 643 - protein, 42 aa, Artificial Sequence
  Synthetic Peptide
LAKATTAPATTRNTGRGGEEKKKEKEKEEQEERETKTPECPS

SEQ ID NO: 644 - protein, 42 aa, Artificial Sequence
  Synthetic Peptide
SLAKATTAPATTRNTGRGGEEKKKEKEKEEQEERETKTPECP

SEQ ID NO: 645 - protein, 42 aa, Artificial Sequence
  Synthetic Peptide
GSLAKATTAPATTRNTGRGGEEKKKEKEKEEQEERETKTPEC

SEQ ID NO: 646 - protein, 42 aa, Artificial Sequence
  Synthetic Peptide
EGSLAKATTAPATTRNTGRGGEEKKKEKEKEEQEERETKTPE

SEQ ID NO: 647 - protein, 42 aa, Artificial Sequence
  Synthetic Peptide
AEGSLAKATTAPATTRNTGRGGEEKKKEKEKEEQEERETKTP

SEQ ID NO: 648 - protein, 42 aa, Artificial Sequence
  Synthetic Peptide
QAEGSLAKATTAPATTRNTGRGGEEKKKEKEKEEQEERETKT

SEQ ID NO: 649 - protein, 42 aa, Artificial Sequence
  Synthetic Peptide
PQAEGSLAKATTAPATTRNTGRGGEEKKKEKEKEEQEERETK

SEQ ID NO: 650 - protein, 42 aa, Artificial Sequence
  Synthetic Peptide
QPQAEGSLAKATTAPATTRNTGRGGEEKKKEKEKEEQEERET

SEQ ID NO: 651 - protein, 42 aa, Artificial Sequence
  Synthetic Peptide
AQPQAEGSLAKATTAPATTRNTGRGGEEKKKEKEKEEQEERE

SEQ ID NO: 652 - protein, 42 aa, Artificial Sequence
  Synthetic Peptide
TAQPQAEGSLAKATTAPATTRNTGRGGEEKKKEKEKEEQEER

SEQ ID NO: 653 - protein, 42 aa, Artificial Sequence
  Synthetic Peptide
PTAQPQAEGSLAKATTAPATTRNTGRGGEEKKKEKEKEEQEE

SEQ ID NO: 654 - protein, 42 aa, Artificial Sequence
  Synthetic Peptide
VPTAQPQAEGSLAKATTAPATTRNTGRGGEEKKKEKEKEEQE

SEQ ID NO: 655 - protein, 42 aa, Artificial Sequence
  Synthetic Peptide
SVPTAQPQAEGSLAKATTAPATTRNTGRGGEEKKKEKEKEEQ

SEQ ID NO: 656 - protein, 42 aa, Artificial Sequence
  Synthetic Peptide
SSVPTAQPQAEGSLAKATTAPATTRNTGRGGEEKKKEKEKEE

SEQ ID NO: 657 - protein, 42 aa, Artificial Sequence
  Synthetic Peptide
ASSVPTAQPQAEGSLAKATTAPATTRNTGRGGEEKKKEKEKE

SEQ ID NO: 658 - protein, 42 aa, Artificial Sequence
  Synthetic Peptide
QASSVPTAQPQAEGSLAKATTAPATTRNTGRGGEEKKKEKEK

SEQ ID NO: 659 - protein, 42 aa, Artificial Sequence
  Synthetic Peptide
AQASSVPTAQPQAEGSLAKATTAPATTRNTGRGGEEKKKEKE

SEQ ID NO: 660 - protein, 42 aa, Artificial Sequence
  Synthetic Peptide
KAQASSVPTAQPQAEGSLAKATTAPATTRNTGRGGEEKKKEK

SEQ ID NO: 661 - protein, 42 aa, Artificial Sequence
  Synthetic Peptide
PKAQASSVPTAQPQAEGSLAKATTAPATTRNTGRGGEEKKKE

SEQ ID NO: 662 - protein, 42 aa, Artificial Sequence
  Synthetic Peptide
SPKAQASSVPTAQPQAEGSLAKATTAPATTRNTGRGGEEKKK

SEQ ID NO: 663 - protein, 42 aa, Artificial Sequence
  Synthetic Peptide
ESPKAQASSVPTAQPQAEGSLAKATTAPATTRNTGRGGEEKK

SEQ ID NO: 664 - protein, 42 aa, Artificial Sequence
  Synthetic Peptide
PESPKAQASSVPTAQPQAEGSLAKATTAPATTRNTGRGGEEK

SEQ ID NO: 665 - protein, 42 aa, Artificial Sequence
  Synthetic Peptide
WPESPKAQASSVPTAQPQAEGSLAKATTAPATTRNTGRGGEE

SEQ ID NO: 666 - protein, 42 aa, Artificial Sequence
  Synthetic Peptide
RWPESPKAQASSVPTAQPQAEGSLAKATTAPATTRNTGRGGE

SEQ ID NO: 667 - protein, 41 aa, Artificial Sequence
  Synthetic Peptide
TGRGGEEKKKEKEKEEQEERETKTPECPSHTQPLGVYLLTP

SEQ ID NO: 668 - protein, 41 aa, Artificial Sequence
  Synthetic Peptide
NTGRGGEEKKKEKEKEEQEERETKTPECPSHTQPLGVYLLT

SEQ ID NO: 669 - protein, 41 aa, Artificial Sequence
  Synthetic Peptide
RNTGRGGEEKKKEKEKEEQEERETKTPECPSHTQPLGVYLL

SEQ ID NO: 670 - protein, 41 aa, Artificial Sequence
  Synthetic Peptide
TRNTGRGGEEKKKEKEKEEQEERETKTPECPSHTQPLGVYL

SEQ ID NO: 671 - protein, 41 aa, Artificial Sequence
  Synthetic Peptide
TTRNTGRGGEEKKKEKEKEEQEERETKTPECPSHTQPLGVY

SEQ ID NO: 672 - protein, 41 aa, Artificial Sequence
  Synthetic Peptide
ATTRNTGRGGEEKKKEKEKEEQEERETKTPECPSHTQPLGV

SEQ ID NO: 673 - protein, 41 aa, Artificial Sequence
  Synthetic Peptide
PATTRNTGRGGEEKKKEKEKEEQEERETKTPECPSHTQPLG

SEQ ID NO: 674 - protein, 41 aa, Artificial Sequence
  Synthetic Peptide
APATTRNTGRGGEEKKKEKEKEEQEERETKTPECPSHTQPL

SEQ ID NO: 675 - protein, 41 aa, Artificial Sequence
  Synthetic Peptide
TAPATTRNTGRGGEEKKKEKEKEEQEERETKTPECPSHTQP

SEQ ID NO: 676 - protein, 41 aa, Artificial Sequence
  Synthetic Peptide
TTAPATTRNTGRGGEEKKKEKEKEEQEERETKTPECPSHTQ

SEQ ID NO: 677 - protein, 41 aa, Artificial Sequence
  Synthetic Peptide
ATTAPATTRNTGRGGEEKKKEKEKEEQEERETKTPECPSHT

SEQ ID NO: 678 - protein, 41 aa, Artificial Sequence
  Synthetic Peptide
KATTAPATTRNTGRGGEEKKKEKEKEEQEERETKTPECPSH

SEQ ID NO: 679 - protein, 41 aa, Artificial Sequence
  Synthetic Peptide
AKATTAPATTRNTGRGGEEKKKEKEKEEQEERETKTPECPS

SEQ ID NO: 680 - protein, 41 aa, Artificial Sequence
  Synthetic Peptide
LAKATTAPATTRNTGRGGEEKKKEKEKEEQEERETKTPECP

SEQ ID NO: 681 - protein, 41 aa, Artificial Sequence
  Synthetic Peptide
SLAKATTAPATTRNTGRGGEEKKKEKEKEEQEERETKTPEC

SEQ ID NO: 682 - protein, 41 aa, Artificial Sequence
  Synthetic Peptide
GSLAKATTAPATTRNTGRGGEEKKKEKEKEEQEERETKTPE

SEQ ID NO: 683 - protein, 41 aa, Artificial Sequence
  Synthetic Peptide
EGSLAKATTAPATTRNTGRGGEEKKKEKEKEEQEERETKTP

SEQ ID NO: 684 - protein, 41 aa, Artificial Sequence
  Synthetic Peptide
AEGSLAKATTAPATTRNTGRGGEEKKKEKEKEEQEERETKT

SEQ ID NO: 685 - protein, 41 aa, Artificial Sequence
  Synthetic Peptide
QAEGSLAKATTAPATTRNTGRGGEEKKKEKEKEEQEERETK

SEQ ID NO: 686 - protein, 41 aa, Artificial Sequence
  Synthetic Peptide
PQAEGSLAKATTAPATTRNTGRGGEEKKKEKEKEEQEERET

SEQ ID NO: 687 - protein, 41 aa, Artificial Sequence
  Synthetic Peptide
QPQAEGSLAKATTAPATTRNTGRGGEEKKKEKEKEEQEERE

SEQ ID NO: 688 - protein, 41 aa, Artificial Sequence
  Synthetic Peptide
AQPQAEGSLAKATTAPATTRNTGRGGEEKKKEKEKEEQEER

SEQ ID NO: 689 - protein, 41 aa, Artificial Sequence
  Synthetic Peptide
TAQPQAEGSLAKATTAPATTRNTGRGGEEKKKEKEKEEQEE

SEQ ID NO: 690 - protein, 41 aa, Artificial Sequence
  Synthetic Peptide
PTAQPQAEGSLAKATTAPATTRNTGRGGEEKKKEKEKEEQE

SEQ ID NO: 691 - protein, 41 aa, Artificial Sequence
  Synthetic Peptide
VPTAQPQAEGSLAKATTAPATTRNTGRGGEEKKKEKEKEEQ

SEQ ID NO: 692 - protein, 41 aa, Artificial Sequence
  Synthetic Peptide
SVPTAQPQAEGSLAKATTAPATTRNTGRGGEEKKKEKEKEE

SEQ ID NO: 693 - protein, 41 aa, Artificial Sequence
  Synthetic Peptide
SSVPTAQPQAEGSLAKATTAPATTRNTGRGGEEKKKEKEKE

SEQ ID NO: 694 - protein, 41 aa, Artificial Sequence
  Synthetic Peptide
ASSVPTAQPQAEGSLAKATTAPATTRNTGRGGEEKKKEKEK

SEQ ID NO: 695 - protein, 41 aa, Artificial Sequence
  Synthetic Peptide
QASSVPTAQPQAEGSLAKATTAPATTRNTGRGGEEKKKEKE

SEQ ID NO: 696 - protein, 41 aa, Artificial Sequence
  Synthetic Peptide
AQASSVPTAQPQAEGSLAKATTAPATTRNTGRGGEEKKKEK

SEQ ID NO: 697 - protein, 41 aa, Artificial Sequence
  Synthetic Peptide
KAQASSVPTAQPQAEGSLAKATTAPATTRNTGRGGEEKKKE

SEQ ID NO: 698 - protein, 41 aa, Artificial Sequence
  Synthetic Peptide
PKAQASSVPTAQPQAEGSLAKATTAPATTRNTGRGGEEKKK

SEQ ID NO: 699 - protein, 41 aa, Artificial Sequence
  Synthetic Peptide
SPKAQASSVPTAQPQAEGSLAKATTAPATTRNTGRGGEEKK

SEQ ID NO: 700 - protein, 41 aa, Artificial Sequence
  Synthetic Peptide
ESPKAQASSVPTAQPQAEGSLAKATTAPATTRNTGRGGEEK

SEQ ID NO: 701 - protein, 41 aa, Artificial Sequence
  Synthetic Peptide
PESPKAQASSVPTAQPQAEGSLAKATTAPATTRNTGRGGEE

SEQ ID NO: 702 - protein, 41 aa, Artificial Sequence
  Synthetic Peptide
WPESPKAQASSVPTAQPQAEGSLAKATTAPATTRNTGRGGE

SEQ ID NO: 703 - protein, 41 aa, Artificial Sequence
  Synthetic Peptide
RWPESPKAQASSVPTAQPQAEGSLAKATTAPATTRNTGRGG

SEQ ID NO: 704 - protein, 40 aa, Artificial Sequence
  Synthetic Peptide
GRGGEEKKKEKEKEEQEERETKTPECPSHTQPLGVYLLTP

SEQ ID NO: 705 - protein, 40 aa, Artificial Sequence
  Synthetic Peptide
TGRGGEEKKKEKEKEEQEERETKTPECPSHTQPLGVYLLT

SEQ ID NO: 706 - protein, 40 aa, Artificial Sequence
  Synthetic Peptide
NTGRGGEEKKKEKEKEEQEERETKTPECPSHTQPLGVYLL

SEQ ID NO: 707 - protein, 40 aa, Artificial Sequence
  Synthetic Peptide
RNTGRGGEEKKKEKEKEEQEERETKTPECPSHTQPLGVYL

SEQ ID NO: 708 - protein, 40 aa, Artificial Sequence
  Synthetic Peptide
TRNTGRGGEEKKKEKEKEEQEERETKTPECPSHTQPLGVY

SEQ ID NO: 709 - protein, 40 aa, Artificial Sequence
  Synthetic Peptide
TTRNTGRGGEEKKKEKEKEEQEERETKTPECPSHTQPLGV

SEQ ID NO: 710 - protein, 40 aa, Artificial Sequence
  Synthetic Peptide
ATTRNTGRGGEEKKKEKEKEEQEERETKTPECPSHTQPLG

SEQ ID NO: 711 - protein, 40 aa, Artificial Sequence
  Synthetic Peptide
PATTRNTGRGGEEKKKEKEKEEQEERETKTPECPSHTQPL

SEQ ID NO: 712 - protein, 40 aa, Artificial Sequence
  Synthetic Peptide
APATTRNTGRGGEEKKKEKEKEEQEERETKTPECPSHTQP

SEQ ID NO: 713 - protein, 40 aa, Artificial Sequence
  Synthetic Peptide
TAPATTRNTGRGGEEKKKEKEKEEQEERETKTPECPSHTQ

SEQ ID NO: 714 - protein, 40 aa, Artificial Sequence
  Synthetic Peptide
TTAPATTRNTGRGGEEKKKEKEKEEQEERETKTPECPSHT

SEQ ID NO: 715 - protein, 40 aa, Artificial Sequence
  Synthetic Peptide
ATTAPATTRNTGRGGEEKKKEKEKEEQEERETKTPECPSH

SEQ ID NO: 716 - protein, 40 aa, Artificial Sequence
  Synthetic Peptide
KATTAPATTRNTGRGGEEKKKEKEKEEQEERETKTPECPS

SEQ ID NO: 717 - protein, 40 aa, Artificial Sequence
  Synthetic Peptide
AKATTAPATTRNTGRGGEEKKKEKEKEEQEERETKTPECP

SEQ ID NO: 718 - protein, 40 aa, Artificial Sequence
  Synthetic Peptide
LAKATTAPATTRNTGRGGEEKKKEKEKEEQEERETKTPEC

SEQ ID NO: 719 - protein, 40 aa, Artificial Sequence
  Synthetic Peptide
SLAKATTAPATTRNTGRGGEEKKKEKEKEEQEERETKTPE

SEQ ID NO: 720 - protein, 40 aa, Artificial Sequence
  Synthetic Peptide
GSLAKATTAPATTRNTGRGGEEKKKEKEKEEQEERETKTP

SEQ ID NO: 721 - protein, 40 aa, Artificial Sequence
  Synthetic Peptide
EGSLAKATTAPATTRNTGRGGEEKKKEKEKEEQEERETKT

SEQ ID NO: 722 - protein, 40 aa, Artificial Sequence
  Synthetic Peptide
AEGSLAKATTAPATTRNTGRGGEEKKKEKEKEEQEERETK

SEQ ID NO: 723 - protein, 40 aa, Artificial Sequence
  Synthetic Peptide
QAEGSLAKATTAPATTRNTGRGGEEKKKEKEKEEQEERET

SEQ ID NO: 724 - protein, 40 aa, Artificial Sequence
  Synthetic Peptide
PQAEGSLAKATTAPATTRNTGRGGEEKKKEKEKEEQEERE

SEQ ID NO: 725 - protein, 40 aa, Artificial Sequence
  Synthetic Peptide
QPQAEGSLAKATTAPATTRNTGRGGEEKKKEKEKEEQEER

SEQ ID NO: 726 - protein, 40 aa, Artificial Sequence
  Synthetic Peptide
AQPQAEGSLAKATTAPATTRNTGRGGEEKKKEKEKEEQEE

SEQ ID NO: 727 - protein, 40 aa, Artificial Sequence
  Synthetic Peptide
TAQPQAEGSLAKATTAPATTRNTGRGGEEKKKEKEKEEQE

SEQ ID NO: 728 - protein, 40 aa, Artificial Sequence
  Synthetic Peptide
PTAQPQAEGSLAKATTAPATTRNTGRGGEEKKKEKEKEEQ

SEQ ID NO: 729 - protein, 40 aa, Artificial Sequence
  Synthetic Peptide
VPTAQPQAEGSLAKATTAPATTRNTGRGGEEKKKEKEKEE

SEQ ID NO: 730 - protein, 40 aa, Artificial Sequence
  Synthetic Peptide
SVPTAQPQAEGSLAKATTAPATTRNTGRGGEEKKKEKEKE

SEQ ID NO: 731 - protein, 40 aa, Artificial Sequence
  Synthetic Peptide
SSVPTAQPQAEGSLAKATTAPATTRNTGRGGEEKKKEKEK

SEQ ID NO: 732 - protein, 40 aa, Artificial Sequence
  Synthetic Peptide
ASSVPTAQPQAEGSLAKATTAPATTRNTGRGGEEKKKEKE

SEQ ID NO: 733 - protein, 40 aa, Artificial Sequence
  Synthetic Peptide
QASSVPTAQPQAEGSLAKATTAPATTRNTGRGGEEKKKEK

SEQ ID NO: 734 - protein, 40 aa, Artificial Sequence
  Synthetic Peptide
AQASSVPTAQPQAEGSLAKATTAPATTRNTGRGGEEKKKE

SEQ ID NO: 735 - protein, 40 aa, Artificial Sequence
  Synthetic Peptide
KAQASSVPTAQPQAEGSLAKATTAPATTRNTGRGGEEKKK

SEQ ID NO: 736 - protein, 40 aa, Artificial Sequence
  Synthetic Peptide
PKAQASSVPTAQPQAEGSLAKATTAPATTRNTGRGGEEKK

SEQ ID NO: 737 - protein, 40 aa, Artificial Sequence
  Synthetic Peptide
SPKAQASSVPTAQPQAEGSLAKATTAPATTRNTGRGGEEK

SEQ ID NO: 738 - protein, 40 aa, Artificial Sequence
  Synthetic Peptide
ESPKAQASSVPTAQPQAEGSLAKATTAPATTRNTGRGGEE

SEQ ID NO: 739 - protein, 40 aa, Artificial Sequence
  Synthetic Peptide
PESPKAQASSVPTAQPQAEGSLAKATTAPATTRNTGRGGE

SEQ ID NO: 740 - protein, 40 aa, Artificial Sequence
  Synthetic Peptide
WPESPKAQASSVPTAQPQAEGSLAKATTAPATTRNTGRGG

SEQ ID NO: 741 - protein, 40 aa, Artificial Sequence
  Synthetic Peptide
RWPESPKAQASSVPTAQPQAEGSLAKATTAPATTRNTGRG

SEQ ID NO: 742 - protein, 39 aa, Artificial Sequence
  Synthetic Peptide
RGGEEKKKEKEKEEQEERETKTPECPSHTQPLGVYLLTP

SEQ ID NO: 743 - protein, 39 aa, Artificial Sequence
  Synthetic Peptide
GRGGEEKKKEKEKEEQEERETKTPECPSHTQPLGVYLLT

SEQ ID NO: 744 - protein, 39 aa, Artificial Sequence
  Synthetic Peptide
TGRGGEEKKKEKEKEEQEERETKTPECPSHTQPLGVYLL

SEQ ID NO: 745 - protein, 39 aa, Artificial Sequence
  Synthetic Peptide
NTGRGGEEKKKEKEKEEQEERETKTPECPSHTQPLGVYL

SEQ ID NO: 746 - protein, 39 aa, Artificial Sequence
  Synthetic Peptide
RNTGRGGEEKKKEKEKEEQEERETKTPECPSHTQPLGVY

SEQ ID NO: 747 - protein, 39 aa, Artificial Sequence
  Synthetic Peptide
TRNTGRGGEEKKKEKEKEEQEERETKTPECPSHTQPLGV

SEQ ID NO: 748 - protein, 39 aa, Artificial Sequence
  Synthetic Peptide
TTRNTGRGGEEKKKEKEKEEQEERETKTPECPSHTQPLG

SEQ ID NO: 749 - protein, 39 aa, Artificial Sequence
  Synthetic Peptide
ATTRNTGRGGEEKKKEKEKEEQEERETKTPECPSHTQPL

SEQ ID NO: 750 - protein, 39 aa, Artificial Sequence
  Synthetic Peptide
PATTRNTGRGGEEKKKEKEKEEQEERETKTPECPSHTQP

SEQ ID NO: 751 - protein, 39 aa, Artificial Sequence
  Synthetic Peptide
APATTRNTGRGGEEKKKEKEKEEQEERETKTPECPSHTQ

SEQ ID NO: 752 - protein, 39 aa, Artificial Sequence
  Synthetic Peptide
TAPATTRNTGRGGEEKKKEKEKEEQEERETKTPECPSHT

SEQ ID NO: 753 - protein, 39 aa, Artificial Sequence
  Synthetic Peptide
TTAPATTRNTGRGGEEKKKEKEKEEQEERETKTPECPSH

SEQ ID NO: 754 - protein, 39 aa, Artificial Sequence
  Synthetic Peptide
ATTAPATTRNTGRGGEEKKKEKEKEEQEERETKTPECPS

SEQ ID NO: 755 - protein, 39 aa, Artificial Sequence
  Synthetic Peptide
KATTAPATTRNTGRGGEEKKKEKEKEEQEERETKTPECP

SEQ ID NO: 756 - protein, 39 aa, Artificial Sequence
  Synthetic Peptide
AKATTAPATTRNTGRGGEEKKKEKEKEEQEERETKTPEC

SEQ ID NO: 757 - protein, 39 aa, Artificial Sequence
  Synthetic Peptide
LAKATTAPATTRNTGRGGEEKKKEKEKEEQEERETKTPE

SEQ ID NO: 758 - protein, 39 aa, Artificial Sequence
  Synthetic Peptide
SLAKATTAPATTRNTGRGGEEKKKEKEKEEQEERETKTP

SEQ ID NO: 759 - protein, 39 aa, Artificial Sequence
  Synthetic Peptide
GSLAKATTAPATTRNTGRGGEEKKKEKEKEEQEERETKT

SEQ ID NO: 760 - protein, 39 aa, Artificial Sequence
  Synthetic Peptide
EGSLAKATTAPATTRNTGRGGEEKKKEKEKEEQEERETK

SEQ ID NO: 761 - protein, 39 aa, Artificial Sequence
  Synthetic Peptide
AEGSLAKATTAPATTRNTGRGGEEKKKEKEKEEQEERET

SEQ ID NO: 762 - protein, 39 aa, Artificial Sequence
  Synthetic Peptide
QAEGSLAKATTAPATTRNTGRGGEEKKKEKEKEEQEERE

SEQ ID NO: 763 - protein, 39 aa, Artificial Sequence
  Synthetic Peptide
PQAEGSLAKATTAPATTRNTGRGGEEKKKEKEKEEQEER

SEQ ID NO: 764 - protein, 39 aa, Artificial Sequence
  Synthetic Peptide
QPQAEGSLAKATTAPATTRNTGRGGEEKKKEKEKEEQEE

SEQ ID NO: 765 - protein, 39 aa, Artificial Sequence
  Synthetic Peptide
AQPQAEGSLAKATTAPATTRNTGRGGEEKKKEKEKEEQE

SEQ ID NO: 766 - protein, 39 aa, Artificial Sequence
  Synthetic Peptide
TAQPQAEGSLAKATTAPATTRNTGRGGEEKKKEKEKEEQ

SEQ ID NO: 767 - protein, 39 aa, Artificial Sequence
  Synthetic Peptide
PTAQPQAEGSLAKATTAPATTRNTGRGGEEKKKEKEKEE

SEQ ID NO: 768 - protein, 39 aa, Artificial Sequence
  Synthetic Peptide
VPTAQPQAEGSLAKATTAPATTRNTGRGGEEKKKEKEKE

SEQ ID NO: 769 - protein, 39 aa, Artificial Sequence
  Synthetic Peptide
SVPTAQPQAEGSLAKATTAPATTRNTGRGGEEKKKEKEK

SEQ ID NO: 770 - protein, 39 aa, Artificial Sequence
  Synthetic Peptide
SSVPTAQPQAEGSLAKATTAPATTRNTGRGGEEKKKEKE

SEQ ID NO: 771 - protein, 39 aa, Artificial Sequence
  Synthetic Peptide
ASSVPTAQPQAEGSLAKATTAPATTRNTGRGGEEKKKEK

SEQ ID NO: 772 - protein, 39 aa, Artificial Sequence
  Synthetic Peptide
QASSVPTAQPQAEGSLAKATTAPATTRNTGRGGEEKKKE

SEQ ID NO: 773 - protein, 39 aa, Artificial Sequence
  Synthetic Peptide
AQASSVPTAQPQAEGSLAKATTAPATTRNTGRGGEEKKK

SEQ ID NO: 774 - protein, 39 aa, Artificial Sequence
  Synthetic Peptide
KAQASSVPTAQPQAEGSLAKATTAPATTRNTGRGGEEKK

SEQ ID NO: 775 - protein, 39 aa, Artificial Sequence
  Synthetic Peptide
PKAQASSVPTAQPQAEGSLAKATTAPATTRNTGRGGEEK

SEQ ID NO: 776 - protein, 39 aa, Artificial Sequence
  Synthetic Peptide
SPKAQASSVPTAQPQAEGSLAKATTAPATTRNTGRGGEE

SEQ ID NO: 777 - protein, 39 aa, Artificial Sequence
  Synthetic Peptide
ESPKAQASSVPTAQPQAEGSLAKATTAPATTRNTGRGGE

SEQ ID NO: 778 - protein, 39 aa, Artificial Sequence
  Synthetic Peptide
PESPKAQASSVPTAQPQAEGSLAKATTAPATTRNTGRGG

SEQ ID NO: 779 - protein, 39 aa, Artificial Sequence
  Synthetic Peptide
WPESPKAQASSVPTAQPQAEGSLAKATTAPATTRNTGRG

SEQ ID NO: 780 - protein, 39 aa, Artificial Sequence
  Synthetic Peptide
RWPESPKAQASSVPTAQPQAEGSLAKATTAPATTRNTGR

SEQ ID NO: 781 - protein, 38 aa, Artificial Sequence
  Synthetic Peptide
GGEEKKKEKEKEEQEERETKTPECPSHTQPLGVYLLTP

SEQ ID NO: 782 - protein, 38 aa, Artificial Sequence
  Synthetic Peptide
RGGEEKKKEKEKEEQEERETKTPECPSHTQPLGVYLLT

SEQ ID NO: 783 - protein, 38 aa, Artificial Sequence
  Synthetic Peptide
GRGGEEKKKEKEKEEQEERETKTPECPSHTQPLGVYLL

SEQ ID NO: 784 - protein, 38 aa, Artificial Sequence
  Synthetic Peptide
TGRGGEEKKKEKEKEEQEERETKTPECPSHTQPLGVYL

SEQ ID NO: 785 - protein, 38 aa, Artificial Sequence
  Synthetic Peptide
NTGRGGEEKKKEKEKEEQEERETKTPECPSHTQPLGVY

SEQ ID NO: 786 - protein, 38 aa, Artificial Sequence
  Synthetic Peptide
RNTGRGGEEKKKEKEKEEQEERETKTPECPSHTQPLGV

SEQ ID NO: 787 - protein, 38 aa, Artificial Sequence
  Synthetic Peptide
TRNTGRGGEEKKKEKEKEEQEERETKTPECPSHTQPLG

SEQ ID NO: 788 - protein, 38 aa, Artificial Sequence
  Synthetic Peptide
TTRNTGRGGEEKKKEKEKEEQEERETKTPECPSHTQPL

SEQ ID NO: 789 - protein, 38 aa, Artificial Sequence
  Synthetic Peptide
ATTRNTGRGGEEKKKEKEKEEQEERETKTPECPSHTQP

SEQ ID NO: 790 - protein, 38 aa, Artificial Sequence
  Synthetic Peptide
PATTRNTGRGGEEKKKEKEKEEQEERETKTPECPSHTQ

SEQ ID NO: 791 - protein, 38 aa, Artificial Sequence
  Synthetic Peptide
APATTRNTGRGGEEKKKEKEKEEQEERETKTPECPSHT

SEQ ID NO: 792 - protein, 38 aa, Artificial Sequence
  Synthetic Peptide
TAPATTRNTGRGGEEKKKEKEKEEQEERETKTPECPSH

SEQ ID NO: 793 - protein, 38 aa, Artificial Sequence
  Synthetic Peptide
TTAPATTRNTGRGGEEKKKEKEKEEQEERETKTPECPS

SEQ ID NO: 794 - protein, 38 aa, Artificial Sequence
  Synthetic Peptide
ATTAPATTRNTGRGGEEKKKEKEKEEQEERETKTPECP

SEQ ID NO: 795 - protein, 38 aa, Artificial Sequence
  Synthetic Peptide
KATTAPATTRNTGRGGEEKKKEKEKEEQEERETKTPEC

SEQ ID NO: 796 - protein, 38 aa, Artificial Sequence
  Synthetic Peptide
AKATTAPATTRNTGRGGEEKKKEKEKEEQEERETKTPE

SEQ ID NO: 797 - protein, 38 aa, Artificial Sequence
  Synthetic Peptide
LAKATTAPATTRNTGRGGEEKKKEKEKEEQEERETKTP

SEQ ID NO: 798 - protein, 38 aa, Artificial Sequence
  Synthetic Peptide
SLAKATTAPATTRNTGRGGEEKKKEKEKEEQEERETKT

SEQ ID NO: 799 - protein, 38 aa, Artificial Sequence
  Synthetic Peptide
GSLAKATTAPATTRNTGRGGEEKKKEKEKEEQEERETK

SEQ ID NO: 800 - protein, 38 aa, Artificial Sequence
  Synthetic Peptide
EGSLAKATTAPATTRNTGRGGEEKKKEKEKEEQEERET

SEQ ID NO: 801 - protein, 38 aa, Artificial Sequence
  Synthetic Peptide
AEGSLAKATTAPATTRNTGRGGEEKKKEKEKEEQEERE

SEQ ID NO: 802 - protein, 38 aa, Artificial Sequence
  Synthetic Peptide
QAEGSLAKATTAPATTRNTGRGGEEKKKEKEKEEQEER

SEQ ID NO: 803 - protein, 38 aa, Artificial Sequence
  Synthetic Peptide
PQAEGSLAKATTAPATTRNTGRGGEEKKKEKEKEEQEE

SEQ ID NO: 804 - protein, 38 aa, Artificial Sequence
  Synthetic Peptide
QPQAEGSLAKATTAPATTRNTGRGGEEKKKEKEKEEQE

SEQ ID NO: 805 - protein, 38 aa, Artificial Sequence
  Synthetic Peptide
AQPQAEGSLAKATTAPATTRNTGRGGEEKKKEKEKEEQ

SEQ ID NO: 806 - protein, 38 aa, Artificial Sequence
  Synthetic Peptide
TAQPQAEGSLAKATTAPATTRNTGRGGEEKKKEKEKEE

SEQ ID NO: 807 - protein, 38 aa, Artificial Sequence
  Synthetic Peptide
PTAQPQAEGSLAKATTAPATTRNTGRGGEEKKKEKEKE

SEQ ID NO: 808 - protein, 38 aa, Artificial Sequence
  Synthetic Peptide
VPTAQPQAEGSLAKATTAPATTRNTGRGGEEKKKEKEK

SEQ ID NO: 809 - protein, 38 aa, Artificial Sequence
  Synthetic Peptide
SVPTAQPQAEGSLAKATTAPATTRNTGRGGEEKKKEKE

SEQ ID NO: 810 - protein, 38 aa, Artificial Sequence
  Synthetic Peptide
SSVPTAQPQAEGSLAKATTAPATTRNTGRGGEEKKKEK

SEQ ID NO: 811 - protein, 38 aa, Artificial Sequence
  Synthetic Peptide
ASSVPTAQPQAEGSLAKATTAPATTRNTGRGGEEKKKE

SEQ ID NO: 812 - protein, 38 aa, Artificial Sequence
  Synthetic Peptide
QASSVPTAQPQAEGSLAKATTAPATTRNTGRGGEEKKK

SEQ ID NO: 813 - protein, 38 aa, Artificial Sequence
  Synthetic Peptide
AQASSVPTAQPQAEGSLAKATTAPATTRNTGRGGEEKK

SEQ ID NO: 814 - protein, 38 aa, Artificial Sequence
  Synthetic Peptide
KAQASSVPTAQPQAEGSLAKATTAPATTRNTGRGGEEK

SEQ ID NO: 815 - protein, 38 aa, Artificial Sequence
  Synthetic Peptide
PKAQASSVPTAQPQAEGSLAKATTAPATTRNTGRGGEE

SEQ ID NO: 816 - protein, 38 aa, Artificial Sequence
  Synthetic Peptide
SPKAQASSVPTAQPQAEGSLAKATTAPATTRNTGRGGE

SEQ ID NO: 817 - protein, 38 aa, Artificial Sequence
  Synthetic Peptide
ESPKAQASSVPTAQPQAEGSLAKATTAPATTRNTGRGG

SEQ ID NO: 818 - protein, 38 aa, Artificial Sequence
  Synthetic Peptide
PESPKAQASSVPTAQPQAEGSLAKATTAPATTRNTGRG

SEQ ID NO: 819 - protein, 38 aa, Artificial Sequence
  Synthetic Peptide
WPESPKAQASSVPTAQPQAEGSLAKATTAPATTRNTGR

SEQ ID NO: 820 - protein, 38 aa, Artificial Sequence
  Synthetic Peptide
RWPESPKAQASSVPTAQPQAEGSLAKATTAPATTRNTG

SEQ ID NO: 821 - protein, 37 aa, Artificial Sequence
  Synthetic Peptide
GEEKKKEKEKEEQEERETKTPECPSHTQPLGVYLLTP

SEQ ID NO: 822 - protein, 37 aa, Artificial Sequence
  Synthetic Peptide
GGEEKKKEKEKEEQEERETKTPECPSHTQPLGVYLLT

SEQ ID NO: 823 - protein, 37 aa, Artificial Sequence
  Synthetic Peptide
RGGEEKKKEKEKEEQEERETKTPECPSHTQPLGVYLL

SEQ ID NO: 824 - protein, 37 aa, Artificial Sequence
  Synthetic Peptide
GRGGEEKKKEKEKEEQEERETKTPECPSHTQPLGVYL

SEQ ID NO: 825 - protein, 37 aa, Artificial Sequence
  Synthetic Peptide
TGRGGEEKKKEKEKEEQEERETKTPECPSHTQPLGVY

SEQ ID NO: 826 - protein, 37 aa, Artificial Sequence
  Synthetic Peptide
NTGRGGEEKKKEKEKEEQEERETKTPECPSHTQPLGV

SEQ ID NO: 827 - protein, 37 aa, Artificial Sequence
  Synthetic Peptide
RNTGRGGEEKKKEKEKEEQEERETKTPECPSHTQPLG

SEQ ID NO: 828 - protein, 37 aa, Artificial Sequence
  Synthetic Peptide
TRNTGRGGEEKKKEKEKEEQEERETKTPECPSHTQPL

SEQ ID NO: 829 - protein, 37 aa, Artificial Sequence
  Synthetic Peptide
TTRNTGRGGEEKKKEKEKEEQEERETKTPECPSHTQP

SEQ ID NO: 830 - protein, 37 aa, Artificial Sequence
  Synthetic Peptide
ATTRNTGRGGEEKKKEKEKEEQEERETKTPECPSHTQ

SEQ ID NO: 831 - protein, 37 aa, Artificial Sequence
  Synthetic Peptide
PATTRNTGRGGEEKKKEKEKEEQEERETKTPECPSHT

SEQ ID NO: 832 - protein, 37 aa, Artificial Sequence
  Synthetic Peptide
APATTRNTGRGGEEKKKEKEKEEQEERETKTPECPSH

SEQ ID NO: 833 - protein, 37 aa, Artificial Sequence
  Synthetic Peptide
TAPATTRNTGRGGEEKKKEKEKEEQEERETKTPECPS

SEQ ID NO: 834 - protein, 37 aa, Artificial Sequence
  Synthetic Peptide
TTAPATTRNTGRGGEEKKKEKEKEEQEERETKTPECP

SEQ ID NO: 835 - protein, 37 aa, Artificial Sequence
  Synthetic Peptide
ATTAPATTRNTGRGGEEKKKEKEKEEQEERETKTPEC

SEQ ID NO: 836 - protein, 37 aa, Artificial Sequence
  Synthetic Peptide
KATTAPATTRNTGRGGEEKKKEKEKEEQEERETKTPE

SEQ ID NO: 837 - protein, 37 aa, Artificial Sequence
  Synthetic Peptide
AKATTAPATTRNTGRGGEEKKKEKEKEEQEERETKTP

SEQ ID NO: 838 - protein, 37 aa, Artificial Sequence
  Synthetic Peptide
LAKATTAPATTRNTGRGGEEKKKEKEKEEQEERETKT

SEQ ID NO: 839 - protein, 37 aa, Artificial Sequence
  Synthetic Peptide
SLAKATTAPATTRNTGRGGEEKKKEKEKEEQEERETK

SEQ ID NO: 840 - protein, 37 aa, Artificial Sequence
  Synthetic Peptide
GSLAKATTAPATTRNTGRGGEEKKKEKEKEEQEERET

SEQ ID NO: 841 - protein, 37 aa, Artificial Sequence
  Synthetic Peptide
EGSLAKATTAPATTRNTGRGGEEKKKEKEKEEQEERE

SEQ ID NO: 842 - protein, 37 aa, Artificial Sequence
  Synthetic Peptide
AEGSLAKATTAPATTRNTGRGGEEKKKEKEKEEQEER

SEQ ID NO: 843 - protein, 37 aa, Artificial Sequence
  Synthetic Peptide
QAEGSLAKATTAPATTRNTGRGGEEKKKEKEKEEQEE

SEQ ID NO: 844 - protein, 37 aa, Artificial Sequence
  Synthetic Peptide
PQAEGSLAKATTAPATTRNTGRGGEEKKKEKEKEEQE

SEQ ID NO: 845 - protein, 37 aa, Artificial Sequence
  Synthetic Peptide
QPQAEGSLAKATTAPATTRNTGRGGEEKKKEKEKEEQ

SEQ ID NO: 846 - protein, 37 aa, Artificial Sequence
  Synthetic Peptide
AQPQAEGSLAKATTAPATTRNTGRGGEEKKKEKEKEE

SEQ ID NO: 847 - protein, 37 aa, Artificial Sequence
  Synthetic Peptide
TAQPQAEGSLAKATTAPATTRNTGRGGEEKKKEKEKE

SEQ ID NO: 848 - protein, 37 aa, Artificial Sequence
  Synthetic Peptide
PTAQPQAEGSLAKATTAPATTRNTGRGGEEKKKEKEK

SEQ ID NO: 849 - protein, 37 aa, Artificial Sequence
  Synthetic Peptide
VPTAQPQAEGSLAKATTAPATTRNTGRGGEEKKKEKE

SEQ ID NO: 850 - protein, 37 aa, Artificial Sequence
  Synthetic Peptide
SVPTAQPQAEGSLAKATTAPATTRNTGRGGEEKKKEK

SEQ ID NO: 851 - protein, 37 aa, Artificial Sequence
  Synthetic Peptide
SSVPTAQPQAEGSLAKATTAPATTRNTGRGGEEKKKE

SEQ ID NO: 852 - protein, 37 aa, Artificial Sequence
  Synthetic Peptide
ASSVPTAQPQAEGSLAKATTAPATTRNTGRGGEEKKK

SEQ ID NO: 853 - protein, 37 aa, Artificial Sequence
  Synthetic Peptide
QASSVPTAQPQAEGSLAKATTAPATTRNTGRGGEEKK

SEQ ID NO: 854 - protein, 37 aa, Artificial Sequence
  Synthetic Peptide
AQASSVPTAQPQAEGSLAKATTAPATTRNTGRGGEEK

SEQ ID NO: 855 - protein, 37 aa, Artificial Sequence
  Synthetic Peptide
KAQASSVPTAQPQAEGSLAKATTAPATTRNTGRGGEE

SEQ ID NO: 856 - protein, 37 aa, Artificial Sequence
  Synthetic Peptide
PKAQASSVPTAQPQAEGSLAKATTAPATTRNTGRGGE

SEQ ID NO: 857 - protein, 37 aa, Artificial Sequence
  Synthetic Peptide
SPKAQASSVPTAQPQAEGSLAKATTAPATTRNTGRGG

SEQ ID NO: 858 - protein, 37 aa, Artificial Sequence
  Synthetic Peptide
ESPKAQASSVPTAQPQAEGSLAKATTAPATTRNTGRG

SEQ ID NO: 859 - protein, 37 aa, Artificial Sequence
  Synthetic Peptide
PESPKAQASSVPTAQPQAEGSLAKATTAPATTRNTGR

SEQ ID NO: 860 - protein, 37 aa, Artificial Sequence
  Synthetic Peptide
WPESPKAQASSVPTAQPQAEGSLAKATTAPATTRNTG

SEQ ID NO: 861 - protein, 37 aa, Artificial Sequence
  Synthetic Peptide
RWPESPKAQASSVPTAQPQAEGSLAKATTAPATTRNT

SEQ ID NO: 862 - protein, 36 aa, Artificial Sequence
  Synthetic Peptide
EEKKKEKEKEEQEERETKTPECPSHTQPLGVYLLTP

SEQ ID NO: 863 - protein, 36 aa, Artificial Sequence
  Synthetic Peptide
GEEKKKEKEKEEQEERETKTPECPSHTQPLGVYLLT

SEQ ID NO: 864 - protein, 36 aa, Artificial Sequence
  Synthetic Peptide
GGEEKKKEKEKEEQEERETKTPECPSHTQPLGVYLL

SEQ ID NO: 865 - protein, 36 aa, Artificial Sequence
  Synthetic Peptide
RGGEEKKKEKEKEEQEERETKTPECPSHTQPLGVYL

SEQ ID NO: 866 - protein, 36 aa, Artificial Sequence
  Synthetic Peptide
GRGGEEKKKEKEKEEQEERETKTPECPSHTQPLGVY

SEQ ID NO: 867 - protein, 36 aa, Artificial Sequence
  Synthetic Peptide
TGRGGEEKKKEKEKEEQEERETKTPECPSHTQPLGV

SEQ ID NO: 868 - protein, 36 aa, Artificial Sequence
  Synthetic Peptide
NTGRGGEEKKKEKEKEEQEERETKTPECPSHTQPLG

SEQ ID NO: 869 - protein, 36 aa, Artificial Sequence
  Synthetic Peptide
RNTGRGGEEKKKEKEKEEQEERETKTPECPSHTQPL

SEQ ID NO: 870 - protein, 36 aa, Artificial Sequence
  Synthetic Peptide
TRNTGRGGEEKKKEKEKEEQEERETKTPECPSHTQP

SEQ ID NO: 871 - protein, 36 aa, Artificial Sequence
  Synthetic Peptide
TTRNTGRGGEEKKKEKEKEEQEERETKTPECPSHTQ

SEQ ID NO: 872 - protein, 36 aa, Artificial Sequence
  Synthetic Peptide
ATTRNTGRGGEEKKKEKEKEEQEERETKTPECPSHT

SEQ ID NO: 873 - protein, 36 aa, Artificial Sequence
  Synthetic Peptide
PATTRNTGRGGEEKKKEKEKEEQEERETKTPECPSH

SEQ ID NO: 874 - protein, 36 aa, Artificial Sequence
  Synthetic Peptide
APATTRNTGRGGEEKKKEKEKEEQEERETKTPECPS

SEQ ID NO: 875 - protein, 36 aa, Artificial Sequence
  Synthetic Peptide
TAPATTRNTGRGGEEKKKEKEKEEQEERETKTPECP

SEQ ID NO: 876 - protein, 36 aa, Artificial Sequence
  Synthetic Peptide
TTAPATTRNTGRGGEEKKKEKEKEEQEERETKTPEC

SEQ ID NO: 877 - protein, 36 aa, Artificial Sequence
  Synthetic Peptide
ATTAPATTRNTGRGGEEKKKEKEKEEQEERETKTPE

SEQ ID NO: 878 - protein, 36 aa, Artificial Sequence
  Synthetic Peptide
KATTAPATTRNTGRGGEEKKKEKEKEEQEERETKTP

SEQ ID NO: 879 - protein, 36 aa, Artificial Sequence
  Synthetic Peptide
AKATTAPATTRNTGRGGEEKKKEKEKEEQEERETKT

SEQ ID NO: 880 - protein, 36 aa, Artificial Sequence
  Synthetic Peptide
LAKATTAPATTRNTGRGGEEKKKEKEKEEQEERETK

SEQ ID NO: 881 - protein, 36 aa, Artificial Sequence
  Synthetic Peptide
SLAKATTAPATTRNTGRGGEEKKKEKEKEEQEERET

SEQ ID NO: 882 - protein, 36 aa, Artificial Sequence
  Synthetic Peptide
GSLAKATTAPATTRNTGRGGEEKKKEKEKEEQEERE

SEQ ID NO: 883 - protein, 36 aa, Artificial Sequence
  Synthetic Peptide
EGSLAKATTAPATTRNTGRGGEEKKKEKEKEEQEER

SEQ ID NO: 884 - protein, 36 aa, Artificial Sequence
  Synthetic Peptide
AEGSLAKATTAPATTRNTGRGGEEKKKEKEKEEQEE

SEQ ID NO: 885 - protein, 36 aa, Artificial Sequence
  Synthetic Peptide
QAEGSLAKATTAPATTRNTGRGGEEKKKEKEKEEQE

SEQ ID NO: 886 - protein, 36 aa, Artificial Sequence
  Synthetic Peptide
PQAEGSLAKATTAPATTRNTGRGGEEKKKEKEKEEQ

SEQ ID NO: 887 - protein, 36 aa, Artificial Sequence
  Synthetic Peptide
QPQAEGSLAKATTAPATTRNTGRGGEEKKKEKEKEE

SEQ ID NO: 888 - protein, 36 aa, Artificial Sequence
  Synthetic Peptide
AQPQAEGSLAKATTAPATTRNTGRGGEEKKKEKEKE

SEQ ID NO: 889 - protein, 36 aa, Artificial Sequence
  Synthetic Peptide
TAQPQAEGSLAKATTAPATTRNTGRGGEEKKKEKEK

SEQ ID NO: 890 - protein, 36 aa, Artificial Sequence
  Synthetic Peptide
PTAQPQAEGSLAKATTAPATTRNTGRGGEEKKKEKE

SEQ ID NO: 891 - protein, 36 aa, Artificial Sequence
  Synthetic Peptide
VPTAQPQAEGSLAKATTAPATTRNTGRGGEEKKKEK

SEQ ID NO: 892 - protein, 36 aa, Artificial Sequence
  Synthetic Peptide
SVPTAQPQAEGSLAKATTAPATTRNTGRGGEEKKKE

SEQ ID NO: 893 - protein, 36 aa, Artificial Sequence
  Synthetic Peptide
SSVPTAQPQAEGSLAKATTAPATTRNTGRGGEEKKK

SEQ ID NO: 894 - protein, 36 aa, Artificial Sequence
  Synthetic Peptide
ASSVPTAQPQAEGSLAKATTAPATTRNTGRGGEEKK

SEQ ID NO: 895 - protein, 36 aa, Artificial Sequence
  Synthetic Peptide
QASSVPTAQPQAEGSLAKATTAPATTRNTGRGGEEK

SEQ ID NO: 896 - protein, 36 aa, Artificial Sequence
  Synthetic Peptide
AQASSVPTAQPQAEGSLAKATTAPATTRNTGRGGEE

SEQ ID NO: 897 - protein, 36 aa, Artificial Sequence
  Synthetic Peptide
KAQASSVPTAQPQAEGSLAKATTAPATTRNTGRGGE

SEQ ID NO: 898 - protein, 36 aa, Artificial Sequence
  Synthetic Peptide
PKAQASSVPTAQPQAEGSLAKATTAPATTRNTGRGG

SEQ ID NO: 899 - protein, 36 aa, Artificial Sequence
  Synthetic Peptide
SPKAQASSVPTAQPQAEGSLAKATTAPATTRNTGRG

SEQ ID NO: 900 - protein, 36 aa, Artificial Sequence
  Synthetic Peptide
ESPKAQASSVPTAQPQAEGSLAKATTAPATTRNTGR

SEQ ID NO: 901 - protein, 36 aa, Artificial Sequence
  Synthetic Peptide
PESPKAQASSVPTAQPQAEGSLAKATTAPATTRNTG

SEQ ID NO: 902 - protein, 36 aa, Artificial Sequence
  Synthetic Peptide
WPESPKAQASSVPTAQPQAEGSLAKATTAPATTRNT

SEQ ID NO: 903 - protein, 36 aa, Artificial Sequence
  Synthetic Peptide
RWPESPKAQASSVPTAQPQAEGSLAKATTAPATTRN

SEQ ID NO: 904 - protein, 35 aa, Artificial Sequence
  Synthetic Peptide
EKKKEKEKEEQEERETKTPECPSHTQPLGVYLLTP

SEQ ID NO: 905 - protein, 35 aa, Artificial Sequence
  Synthetic Peptide
EEKKKEKEKEEQEERETKTPECPSHTQPLGVYLLT

SEQ ID NO: 906 - protein, 35 aa, Artificial Sequence
  Synthetic Peptide
GEEKKKEKEKEEQEERETKTPECPSHTQPLGVYLL

SEQ ID NO: 907 - protein, 35 aa, Artificial Sequence
  Synthetic Peptide
GGEEKKKEKEKEEQEERETKTPECPSHTQPLGVYL

SEQ ID NO: 908 - protein, 35 aa, Artificial Sequence
  Synthetic Peptide
RGGEEKKKEKEKEEQEERETKTPECPSHTQPLGVY

SEQ ID NO: 909 - protein, 35 aa, Artificial Sequence
  Synthetic Peptide
GRGGEEKKKEKEKEEQEERETKTPECPSHTQPLGV

SEQ ID NO: 910 - protein, 35 aa, Artificial Sequence
  Synthetic Peptide
TGRGGEEKKKEKEKEEQEERETKTPECPSHTQPLG

SEQ ID NO: 911 - protein, 35 aa, Artificial Sequence
  Synthetic Peptide
NTGRGGEEKKKEKEKEEQEERETKTPECPSHTQPL

SEQ ID NO: 912 - protein, 35 aa, Artificial Sequence
  Synthetic Peptide
RNTGRGGEEKKKEKEKEEQEERETKTPECPSHTQP

SEQ ID NO: 913 - protein, 35 aa, Artificial Sequence
  Synthetic Peptide
TRNTGRGGEEKKKEKEKEEQEERETKTPECPSHTQ

SEQ ID NO: 914 - protein, 35 aa, Artificial Sequence
  Synthetic Peptide
TTRNTGRGGEEKKKEKEKEEQEERETKTPECPSHT

SEQ ID NO: 915 - protein, 35 aa, Artificial Sequence
  Synthetic Peptide
ATTRNTGRGGEEKKKEKEKEEQEERETKTPECPSH

SEQ ID NO: 916 - protein, 35 aa, Artificial Sequence
  Synthetic Peptide
PATTRNTGRGGEEKKKEKEKEEQEERETKTPECPS

SEQ ID NO: 917 - protein, 35 aa, Artificial Sequence
  Synthetic Peptide
APATTRNTGRGGEEKKKEKEKEEQEERETKTPECP

SEQ ID NO: 918 - protein, 35 aa, Artificial Sequence
  Synthetic Peptide
TAPATTRNTGRGGEEKKKEKEKEEQEERETKTPEC

SEQ ID NO: 919 - protein, 35 aa, Artificial Sequence
  Synthetic Peptide
TTAPATTRNTGRGGEEKKKEKEKEEQEERETKTPE

SEQ ID NO: 920 - protein, 35 aa, Artificial Sequence
  Synthetic Peptide
ATTAPATTRNTGRGGEEKKKEKEKEEQEERETKTP

SEQ ID NO: 921 - protein, 35 aa, Artificial Sequence
  Synthetic Peptide
KATTAPATTRNTGRGGEEKKKEKEKEEQEERETKT

SEQ ID NO: 922 - protein, 35 aa, Artificial Sequence
  Synthetic Peptide
AKATTAPATTRNTGRGGEEKKKEKEKEEQEERETK

SEQ ID NO: 923 - protein, 35 aa, Artificial Sequence
  Synthetic Peptide
LAKATTAPATTRNTGRGGEEKKKEKEKEEQEERET

SEQ ID NO: 924 - protein, 35 aa, Artificial Sequence
  Synthetic Peptide
SLAKATTAPATTRNTGRGGEEKKKEKEKEEQEERE

SEQ ID NO: 925 - protein, 35 aa, Artificial Sequence
  Synthetic Peptide
GSLAKATTAPATTRNTGRGGEEKKKEKEKEEQEER

SEQ ID NO: 926 - protein, 35 aa, Artificial Sequence
  Synthetic Peptide
EGSLAKATTAPATTRNTGRGGEEKKKEKEKEEQEE

SEQ ID NO: 927 - protein, 35 aa, Artificial Sequence
  Synthetic Peptide
AEGSLAKATTAPATTRNTGRGGEEKKKEKEKEEQE

SEQ ID NO: 928 - protein, 35 aa, Artificial Sequence
  Synthetic Peptide
QAEGSLAKATTAPATTRNTGRGGEEKKKEKEKEEQ

SEQ ID NO: 929 - protein, 35 aa, Artificial Sequence
  Synthetic Peptide
PQAEGSLAKATTAPATTRNTGRGGEEKKKEKEKEE

SEQ ID NO: 930 - protein, 35 aa, Artificial Sequence
  Synthetic Peptide
QPQAEGSLAKATTAPATTRNTGRGGEEKKKEKEKE

SEQ ID NO: 931 - protein, 35 aa, Artificial Sequence
  Synthetic Peptide
AQPQAEGSLAKATTAPATTRNTGRGGEEKKKEKEK

SEQ ID NO: 932 - protein, 35 aa, Artificial Sequence
  Synthetic Peptide
TAQPQAEGSLAKATTAPATTRNTGRGGEEKKKEKE

SEQ ID NO: 933 - protein, 35 aa, Artificial Sequence
  Synthetic Peptide
PTAQPQAEGSLAKATTAPATTRNTGRGGEEKKKEK

SEQ ID NO: 934 - protein, 35 aa, Artificial Sequence
  Synthetic Peptide
VPTAQPQAEGSLAKATTAPATTRNTGRGGEEKKKE

SEQ ID NO: 935 - protein, 35 aa, Artificial Sequence
  Synthetic Peptide
SVPTAQPQAEGSLAKATTAPATTRNTGRGGEEKKK

SEQ ID NO: 936 - protein, 35 aa, Artificial Sequence
  Synthetic Peptide
SSVPTAQPQAEGSLAKATTAPATTRNTGRGGEEKK

SEQ ID NO: 937 - protein, 35 aa, Artificial Sequence
  Synthetic Peptide
ASSVPTAQPQAEGSLAKATTAPATTRNTGRGGEEK

SEQ ID NO: 938 - protein, 35 aa, Artificial Sequence
  Synthetic Peptide
QASSVPTAQPQAEGSLAKATTAPATTRNTGRGGEE

SEQ ID NO: 939 - protein, 35 aa, Artificial Sequence
  Synthetic Peptide
AQASSVPTAQPQAEGSLAKATTAPATTRNTGRGGE

SEQ ID NO: 940 - protein, 35 aa, Artificial Sequence
  Synthetic Peptide
KAQASSVPTAQPQAEGSLAKATTAPATTRNTGRGG

SEQ ID NO: 941 - protein, 35 aa, Artificial Sequence
  Synthetic Peptide
PKAQASSVPTAQPQAEGSLAKATTAPATTRNTGRG

SEQ ID NO: 942 - protein, 35 aa, Artificial Sequence
  Synthetic Peptide
SPKAQASSVPTAQPQAEGSLAKATTAPATTRNTGR

SEQ ID NO: 943 - protein, 35 aa, Artificial Sequence
  Synthetic Peptide
ESPKAQASSVPTAQPQAEGSLAKATTAPATTRNTG

SEQ ID NO: 944 - protein, 35 aa, Artificial Sequence
  Synthetic Peptide
PESPKAQASSVPTAQPQAEGSLAKATTAPATTRNT

SEQ ID NO: 945 - protein, 35 aa, Artificial Sequence
  Synthetic Peptide
WPESPKAQASSVPTAQPQAEGSLAKATTAPATTRN

SEQ ID NO: 946 - protein, 35 aa, Artificial Sequence
  Synthetic Peptide
RWPESPKAQASSVPTAQPQAEGSLAKATTAPATTR

SEQ ID NO: 947 - protein, 34 aa, Artificial Sequence
  Synthetic Peptide
KKKEKEKEEQEERETKTPECPSHTQPLGVYLLTP

SEQ ID NO: 948 - protein, 34 aa, Artificial Sequence
  Synthetic Peptide
EKKKEKEKEEQEERETKTPECPSHTQPLGVYLLT

SEQ ID NO: 949 - protein, 34 aa, Artificial Sequence
  Synthetic Peptide
EEKKKEKEKEEQEERETKTPECPSHTQPLGVYLL

SEQ ID NO: 950 - protein, 34 aa, Artificial Sequence
  Synthetic Peptide
GEEKKKEKEKEEQEERETKTPECPSHTQPLGVYL

SEQ ID NO: 951 - protein, 34 aa, Artificial Sequence
  Synthetic Peptide
GGEEKKKEKEKEEQEERETKTPECPSHTQPLGVY

SEQ ID NO: 952 - protein, 34 aa, Artificial Sequence
  Synthetic Peptide
RGGEEKKKEKEKEEQEERETKTPECPSHTQPLGV

SEQ ID NO: 953 - protein, 34 aa, Artificial Sequence
  Synthetic Peptide
GRGGEEKKKEKEKEEQEERETKTPECPSHTQPLG

SEQ ID NO: 954 - protein, 34 aa, Artificial Sequence
  Synthetic Peptide
TGRGGEEKKKEKEKEEQEERETKTPECPSHTQPL

SEQ ID NO: 955 - protein, 34 aa, Artificial Sequence
  Synthetic Peptide
NTGRGGEEKKKEKEKEEQEERETKTPECPSHTQP

SEQ ID NO: 956 - protein, 34 aa, Artificial Sequence
  Synthetic Peptide
TRNTGRGGEEKKKEKEKEEQEERETKTPECPSHT

SEQ ID NO: 957 - protein, 34 aa, Artificial Sequence
  Synthetic Peptide
TTRNTGRGGEEKKKEKEKEEQEERETKTPECPSH

SEQ ID NO: 958 - protein, 34 aa, Artificial Sequence
  Synthetic Peptide
ATTRNTGRGGEEKKKEKEKEEQEERETKTPECPS

SEQ ID NO: 959 - protein, 34 aa, Artificial Sequence
  Synthetic Peptide
PATTRNTGRGGEEKKKEKEKEEQEERETKTPECP

SEQ ID NO: 960 - protein, 34 aa, Artificial Sequence
  Synthetic Peptide
APATTRNTGRGGEEKKKEKEKEEQEERETKTPEC

SEQ ID NO: 961 - protein, 34 aa, Artificial Sequence
  Synthetic Peptide
TAPATTRNTGRGGEEKKKEKEKEEQEERETKTPE

SEQ ID NO: 962 - protein, 34 aa, Artificial Sequence
  Synthetic Peptide
TTAPATTRNTGRGGEEKKKEKEKEEQEERETKTP

SEQ ID NO: 963 - protein, 34 aa, Artificial Sequence
  Synthetic Peptide
ATTAPATTRNTGRGGEEKKKEKEKEEQEERETKT

SEQ ID NO: 964 - protein, 34 aa, Artificial Sequence
  Synthetic Peptide
KATTAPATTRNTGRGGEEKKKEKEKEEQEERETK

SEQ ID NO: 965 - protein, 34 aa, Artificial Sequence
  Synthetic Peptide
AKATTAPATTRNTGRGGEEKKKEKEKEEQEERET

SEQ ID NO: 966 - protein, 34 aa, Artificial Sequence
  Synthetic Peptide
LAKATTAPATTRNTGRGGEEKKKEKEKEEQEERE

SEQ ID NO: 967 - protein, 34 aa, Artificial Sequence
  Synthetic Peptide
SLAKATTAPATTRNTGRGGEEKKKEKEKEEQEER

SEQ ID NO: 968 - protein, 34 aa, Artificial Sequence
  Synthetic Peptide
GSLAKATTAPATTRNTGRGGEEKKKEKEKEEQEE

SEQ ID NO: 969 - protein, 34 aa, Artificial Sequence
  Synthetic Peptide
EGSLAKATTAPATTRNTGRGGEEKKKEKEKEEQE

SEQ ID NO: 970 - protein, 34 aa, Artificial Sequence
  Synthetic Peptide
AEGSLAKATTAPATTRNTGRGGEEKKKEKEKEEQ

SEQ ID NO: 971 - protein, 34 aa, Artificial Sequence
  Synthetic Peptide
QAEGSLAKATTAPATTRNTGRGGEEKKKEKEKEE

SEQ ID NO: 972 - protein, 34 aa, Artificial Sequence
  Synthetic Peptide
PQAEGSLAKATTAPATTRNTGRGGEEKKKEKEKE

SEQ ID NO: 973 - protein, 34 aa, Artificial Sequence
  Synthetic Peptide
QPQAEGSLAKATTAPATTRNTGRGGEEKKKEKEK

SEQ ID NO: 974 - protein, 34 aa, Artificial Sequence
  Synthetic Peptide
AQPQAEGSLAKATTAPATTRNTGRGGEEKKKEKE

SEQ ID NO: 975 - protein, 34 aa, Artificial Sequence
  Synthetic Peptide
TAQPQAEGSLAKATTAPATTRNTGRGGEEKKKEK

SEQ ID NO: 976 - protein, 34 aa, Artificial Sequence
  Synthetic Peptide
PTAQPQAEGSLAKATTAPATTRNTGRGGEEKKKE

SEQ ID NO: 977 - protein, 34 aa, Artificial Sequence
  Synthetic Peptide
VPTAQPQAEGSLAKATTAPATTRNTGRGGEEKKK

SEQ ID NO: 978 - protein, 34 aa, Artificial Sequence
  Synthetic Peptide
SVPTAQPQAEGSLAKATTAPATTRNTGRGGEEKK

SEQ ID NO: 979 - protein, 34 aa, Artificial Sequence
  Synthetic Peptide
SSVPTAQPQAEGSLAKATTAPATTRNTGRGGEEK

SEQ ID NO: 980 - protein, 34 aa, Artificial Sequence
  Synthetic Peptide
ASSVPTAQPQAEGSLAKATTAPATTRNTGRGGEE

SEQ ID NO: 981 - protein, 34 aa, Artificial Sequence
  Synthetic Peptide
QASSVPTAQPQAEGSLAKATTAPATTRNTGRGGE

SEQ ID NO: 982 - protein, 34 aa, Artificial Sequence
  Synthetic Peptide
AQASSVPTAQPQAEGSLAKATTAPATTRNTGRGG

SEQ ID NO: 983 - protein, 34 aa, Artificial Sequence
  Synthetic Peptide
KAQASSVPTAQPQAEGSLAKATTAPATTRNTGRG

SEQ ID NO: 984 - protein, 34 aa, Artificial Sequence
  Synthetic Peptide
PKAQASSVPTAQPQAEGSLAKATTAPATTRNTGR

SEQ ID NO: 985 - protein, 34 aa, Artificial Sequence
  Synthetic Peptide
SPKAQASSVPTAQPQAEGSLAKATTAPATTRNTG

SEQ ID NO: 986 - protein, 34 aa, Artificial Sequence
  Synthetic Peptide
ESPKAQASSVPTAQPQAEGSLAKATTAPATTRNT

SEQ ID NO: 987 - protein, 34 aa, Artificial Sequence
  Synthetic Peptide
PESPKAQASSVPTAQPQAEGSLAKATTAPATTRN

SEQ ID NO: 988 - protein, 34 aa, Artificial Sequence
  Synthetic Peptide
WPESPKAQASSVPTAQPQAEGSLAKATTAPATTR

SEQ ID NO: 989 - protein, 34 aa, Artificial Sequence
  Synthetic Peptide
RWPESPKAQASSVPTAQPQAEGSLAKATTAPATT

SEQ ID NO: 990 - protein, 33 aa, Artificial Sequence
  Synthetic Peptide
KKEKEKEEQEERETKTPECPSHTQPLGVYLLTP

SEQ ID NO: 991 - protein, 33 aa, Artificial Sequence
  Synthetic Peptide
KKKEKEKEEQEERETKTPECPSHTQPLGVYLLT

SEQ ID NO: 992 - protein, 33 aa, Artificial Sequence
  Synthetic Peptide
EKKKEKEKEEQEERETKTPECPSHTQPLGVYLL

SEQ ID NO: 993 - protein, 33 aa, Artificial Sequence
  Synthetic Peptide
EEKKKEKEKEEQEERETKTPECPSHTQPLGVYL

SEQ ID NO: 994 - protein, 33 aa, Artificial Sequence
  Synthetic Peptide
GEEKKKEKEKEEQEERETKTPECPSHTQPLGVY

SEQ ID NO: 995 - protein, 33 aa, Artificial Sequence
  Synthetic Peptide
GGEEKKKEKEKEEQEERETKTPECPSHTQPLGV

SEQ ID NO: 996 - protein, 33 aa, Artificial Sequence
  Synthetic Peptide
RGGEEKKKEKEKEEQEERETKTPECPSHTQPLG

SEQ ID NO: 997 - protein, 33 aa, Artificial Sequence
  Synthetic Peptide
GRGGEEKKKEKEKEEQEERETKTPECPSHTQPL

SEQ ID NO: 998 - protein, 33 aa, Artificial Sequence
  Synthetic Peptide
TGRGGEEKKKEKEKEEQEERETKTPECPSHTQP

SEQ ID NO: 999 - protein, 33 aa, Artificial Sequence
  Synthetic Peptide
NTGRGGEEKKKEKEKEEQEERETKTPECPSHTQ

SEQ ID NO: 1000 - protein, 33 aa, Artificial Sequence
  Synthetic Peptide
RNTGRGGEEKKKEKEKEEQEERETKTPECPSHT

SEQ ID NO: 1001 - protein, 33 aa, Artificial Sequence
  Synthetic Peptide
TRNTGRGGEEKKKEKEKEEQEERETKTPECPSH

SEQ ID NO: 1002 - protein, 33 aa, Artificial Sequence
  Synthetic Peptide
TTRNTGRGGEEKKKEKEKEEQEERETKTPECPS

SEQ ID NO: 1003 - protein, 33 aa, Artificial Sequence
  Synthetic Peptide
ATTRNTGRGGEEKKKEKEKEEQEERETKTPECP

SEQ ID NO: 1004 - protein, 33 aa, Artificial Sequence
  Synthetic Peptide
PATTRNTGRGGEEKKKEKEKEEQEERETKTPEC

SEQ ID NO: 1005 - protein, 33 aa, Artificial Sequence
  Synthetic Peptide
APATTRNTGRGGEEKKKEKEKEEQEERETKTPE

SEQ ID NO: 1006 - protein, 33 aa, Artificial Sequence
  Synthetic Peptide
TAPATTRNTGRGGEEKKKEKEKEEQEERETKTP

SEQ ID NO: 1007 - protein, 33 aa, Artificial Sequence
  Synthetic Peptide
TTAPATTRNTGRGGEEKKKEKEKEEQEERETKT

SEQ ID NO: 1008 - protein, 33 aa, Artificial Sequence
  Synthetic Peptide
ATTAPATTRNTGRGGEEKKKEKEKEEQEERETK

SEQ ID NO: 1009 - protein, 33 aa, Artificial Sequence
  Synthetic Peptide
KATTAPATTRNTGRGGEEKKKEKEKEEQEERET

SEQ ID NO: 1010 - protein, 33 aa, Artificial Sequence
  Synthetic Peptide
AKATTAPATTRNTGRGGEEKKKEKEKEEQEERE

SEQ ID NO: 1011 - protein, 33 aa, Artificial Sequence
  Synthetic Peptide
LAKATTAPATTRNTGRGGEEKKKEKEKEEQEER

SEQ ID NO: 1012 - protein, 33 aa, Artificial Sequence
  Synthetic Peptide
SLAKATTAPATTRNTGRGGEEKKKEKEKEEQEE

SEQ ID NO: 1013 - protein, 33 aa, Artificial Sequence
  Synthetic Peptide
GSLAKATTAPATTRNTGRGGEEKKKEKEKEEQE

SEQ ID NO: 1014 - protein, 33 aa, Artificial Sequence
  Synthetic Peptide
EGSLAKATTAPATTRNTGRGGEEKKKEKEKEEQ

SEQ ID NO: 1015 - protein, 33 aa, Artificial Sequence
  Synthetic Peptide
AEGSLAKATTAPATTRNTGRGGEEKKKEKEKEE

SEQ ID NO: 1016 - protein, 33 aa, Artificial Sequence
  Synthetic Peptide
QAEGSLAKATTAPATTRNTGRGGEEKKKEKEKE

SEQ ID NO: 1017 - protein, 33 aa, Artificial Sequence
  Synthetic Peptide
PQAEGSLAKATTAPATTRNTGRGGEEKKKEKEK

SEQ ID NO: 1018 - protein, 33 aa, Artificial Sequence
  Synthetic Peptide
QPQAEGSLAKATTAPATTRNTGRGGEEKKKEKE

SEQ ID NO: 1019 - protein, 33 aa, Artificial Sequence
  Synthetic Peptide
AQPQAEGSLAKATTAPATTRNTGRGGEEKKKEK

SEQ ID NO: 1020 - protein, 33 aa, Artificial Sequence
  Synthetic Peptide
TAQPQAEGSLAKATTAPATTRNTGRGGEEKKKE

SEQ ID NO: 1021 - protein, 33 aa, Artificial Sequence
  Synthetic Peptide
PTAQPQAEGSLAKATTAPATTRNTGRGGEEKKK

SEQ ID NO: 1022 - protein, 33 aa, Artificial Sequence
  Synthetic Peptide
VPTAQPQAEGSLAKATTAPATTRNTGRGGEEKK

SEQ ID NO: 1023 - protein, 33 aa, Artificial Sequence
  Synthetic Peptide
SVPTAQPQAEGSLAKATTAPATTRNTGRGGEEK

SEQ ID NO: 1024 - protein, 33 aa, Artificial Sequence
  Synthetic Peptide
SSVPTAQPQAEGSLAKATTAPATTRNTGRGGEE

SEQ ID NO: 1025 - protein, 33 aa, Artificial Sequence
  Synthetic Peptide
ASSVPTAQPQAEGSLAKATTAPATTRNTGRGGE

SEQ ID NO: 1026 - protein, 33 aa, Artificial Sequence
  Synthetic Peptide
QASSVPTAQPQAEGSLAKATTAPATTRNTGRGG

SEQ ID NO: 1027 - protein, 33 aa, Artificial Sequence
  Synthetic Peptide
AQASSVPTAQPQAEGSLAKATTAPATTRNTGRG

SEQ ID NO: 1028 - protein, 33 aa, Artificial Sequence
  Synthetic Peptide
KAQASSVPTAQPQAEGSLAKATTAPATTRNTGR

SEQ ID NO: 1029 - protein, 33 aa, Artificial Sequence
  Synthetic Peptide
PKAQASSVPTAQPQAEGSLAKATTAPATTRNTG

SEQ ID NO: 1030 - protein, 33 aa, Artificial Sequence
  Synthetic Peptide
SPKAQASSVPTAQPQAEGSLAKATTAPATTRNT

SEQ ID NO: 1031 - protein, 33 aa, Artificial Sequence
  Synthetic Peptide
ESPKAQASSVPTAQPQAEGSLAKATTAPATTRN

SEQ ID NO: 1032 - protein, 33 aa, Artificial Sequence
  Synthetic Peptide
PESPKAQASSVPTAQPQAEGSLAKATTAPATTR

SEQ ID NO: 1033 - protein, 33 aa, Artificial Sequence
  Synthetic Peptide
WPESPKAQASSVPTAQPQAEGSLAKATTAPATT

SEQ ID NO: 1034 - protein, 33 aa, Artificial Sequence
  Synthetic Peptide
RWPESPKAQASSVPTAQPQAEGSLAKATTAPAT

SEQ ID NO: 1035 - protein, 32 aa, Artificial Sequence
  Synthetic Peptide
KEKEKEEQEERETKTPECPSHTQPLGVYLLTP

SEQ ID NO: 1036 - protein, 32 aa, Artificial Sequence
  Synthetic Peptide
KKEKEKEEQEERETKTPECPSHTQPLGVYLLT

SEQ ID NO: 1037 - protein, 32 aa, Artificial Sequence
  Synthetic Peptide
KKKEKEKEEQEERETKTPECPSHTQPLGVYLL

SEQ ID NO: 1038 - protein, 32 aa, Artificial Sequence
  Synthetic Peptide
EKKKEKEKEEQEERETKTPECPSHTQPLGVYL

SEQ ID NO: 1039 - protein, 32 aa, Artificial Sequence
  Synthetic Peptide
EEKKKEKEKEEQEERETKTPECPSHTQPLGVY

SEQ ID NO: 1040 - protein, 32 aa, Artificial Sequence
  Synthetic Peptide
GEEKKKEKEKEEQEERETKTPECPSHTQPLGV

SEQ ID NO: 1041 - protein, 32 aa, Artificial Sequence
  Synthetic Peptide
GGEEKKKEKEKEEQEERETKTPECPSHTQPLG

SEQ ID NO: 1042 - protein, 32 aa, Artificial Sequence
  Synthetic Peptide
RGGEEKKKEKEKEEQEERETKTPECPSHTQPL

SEQ ID NO: 1043 - protein, 32 aa, Artificial Sequence
  Synthetic Peptide
GRGGEEKKKEKEKEEQEERETKTPECPSHTQP

SEQ ID NO: 1044 - protein, 32 aa, Artificial Sequence
  Synthetic Peptide
TGRGGEEKKKEKEKEEQEERETKTPECPSHTQ

SEQ ID NO: 1045 - protein, 32 aa, Artificial Sequence
  Synthetic Peptide
NTGRGGEEKKKEKEKEEQEERETKTPECPSHT

SEQ ID NO: 1046 - protein, 32 aa, Artificial Sequence
  Synthetic Peptide
RNTGRGGEEKKKEKEKEEQEERETKTPECPSH

SEQ ID NO: 1047 - protein, 32 aa, Artificial Sequence
  Synthetic Peptide
TRNTGRGGEEKKKEKEKEEQEERETKTPECPS

SEQ ID NO: 1048 - protein, 32 aa, Artificial Sequence
  Synthetic Peptide
TTRNTGRGGEEKKKEKEKEEQEERETKTPECP

SEQ ID NO: 1049 - protein, 32 aa, Artificial Sequence
  Synthetic Peptide
ATTRNTGRGGEEKKKEKEKEEQEERETKTPEC

SEQ ID NO: 1050 - protein, 32 aa, Artificial Sequence
  Synthetic Peptide
PATTRNTGRGGEEKKKEKEKEEQEERETKTPE

SEQ ID NO: 1051 - protein, 32 aa, Artificial Sequence
  Synthetic Peptide
APATTRNTGRGGEEKKKEKEKEEQEERETKTP

SEQ ID NO: 1052 - protein, 32 aa, Artificial Sequence
  Synthetic Peptide
TAPATTRNTGRGGEEKKKEKEKEEQEERETKT

SEQ ID NO: 1053 - protein, 32 aa, Artificial Sequence
  Synthetic Peptide
TTAPATTRNTGRGGEEKKKEKEKEEQEERETK

SEQ ID NO: 1054 - protein, 32 aa, Artificial Sequence
  Synthetic Peptide
ATTAPATTRNTGRGGEEKKKEKEKEEQEERET

SEQ ID NO: 1055 - protein, 32 aa, Artificial Sequence
  Synthetic Peptide
KATTAPATTRNTGRGGEEKKKEKEKEEQEERE

SEQ ID NO: 1056 - protein, 32 aa, Artificial Sequence
  Synthetic Peptide
AKATTAPATTRNTGRGGEEKKKEKEKEEQEER

SEQ ID NO: 1057 - protein, 32 aa, Artificial Sequence
  Synthetic Peptide
LAKATTAPATTRNTGRGGEEKKKEKEKEEQEE

SEQ ID NO: 1058 - protein, 32 aa, Artificial Sequence
  Synthetic Peptide
SLAKATTAPATTRNTGRGGEEKKKEKEKEEQE

SEQ ID NO: 1059 - protein, 32 aa, Artificial Sequence
  Synthetic Peptide
GSLAKATTAPATTRNTGRGGEEKKKEKEKEEQ

SEQ ID NO: 1060 - protein, 32 aa, Artificial Sequence
  Synthetic Peptide
EGSLAKATTAPATTRNTGRGGEEKKKEKEKEE

SEQ ID NO: 1061 - protein, 32 aa, Artificial Sequence
  Synthetic Peptide
AEGSLAKATTAPATTRNTGRGGEEKKKEKEKE

SEQ ID NO: 1062 - protein, 32 aa, Artificial Sequence
  Synthetic Peptide
QAEGSLAKATTAPATTRNTGRGGEEKKKEKEK

SEQ ID NO: 1063 - protein, 32 aa, Artificial Sequence
  Synthetic Peptide
PQAEGSLAKATTAPATTRNTGRGGEEKKKEKE

SEQ ID NO: 1064 - protein, 32 aa, Artificial Sequence
  Synthetic Peptide
QPQAEGSLAKATTAPATTRNTGRGGEEKKKEK

SEQ ID NO: 1065 - protein, 32 aa, Artificial Sequence
  Synthetic Peptide
AQPQAEGSLAKATTAPATTRNTGRGGEEKKKE

SEQ ID NO: 1066 - protein, 32 aa, Artificial Sequence
  Synthetic Peptide
TAQPQAEGSLAKATTAPATTRNTGRGGEEKKK

SEQ ID NO: 1067 - protein, 32 aa, Artificial Sequence
  Synthetic Peptide
PTAQPQAEGSLAKATTAPATTRNTGRGGEEKK

SEQ ID NO: 1068 - protein, 32 aa, Artificial Sequence
  Synthetic Peptide
VPTAQPQAEGSLAKATTAPATTRNTGRGGEEK

SEQ ID NO: 1069 - protein, 32 aa, Artificial Sequence
  Synthetic Peptide
SVPTAQPQAEGSLAKATTAPATTRNTGRGGEE

SEQ ID NO: 1070 - protein, 32 aa, Artificial Sequence
  Synthetic Peptide
SSVPTAQPQAEGSLAKATTAPATTRNTGRGGE

SEQ ID NO: 1071 - protein, 32 aa, Artificial Sequence
  Synthetic Peptide
ASSVPTAQPQAEGSLAKATTAPATTRNTGRGG

SEQ ID NO: 1072 - protein, 32 aa, Artificial Sequence
  Synthetic Peptide
QASSVPTAQPQAEGSLAKATTAPATTRNTGRG

SEQ ID NO: 1073 - protein, 32 aa, Artificial Sequence
  Synthetic Peptide
AQASSVPTAQPQAEGSLAKATTAPATTRNTGR

SEQ ID NO: 1074 - protein, 32 aa, Artificial Sequence
  Synthetic Peptide
KAQASSVPTAQPQAEGSLAKATTAPATTRNTG

SEQ ID NO: 1075 - protein, 32 aa, Artificial Sequence
  Synthetic Peptide
PKAQASSVPTAQPQAEGSLAKATTAPATTRNT

SEQ ID NO: 1076 - protein, 32 aa, Artificial Sequence
  Synthetic Peptide
SPKAQASSVPTAQPQAEGSLAKATTAPATTRN

SEQ ID NO: 1077 - protein, 32 aa, Artificial Sequence
  Synthetic Peptide
ESPKAQASSVPTAQPQAEGSLAKATTAPATTR

SEQ ID NO: 1078 - protein, 32 aa, Artificial Sequence
  Synthetic Peptide
PESPKAQASSVPTAQPQAEGSLAKATTAPATT

SEQ ID NO: 1079 - protein, 32 aa, Artificial Sequence
  Synthetic Peptide
WPESPKAQASSVPTAQPQAEGSLAKATTAPAT

SEQ ID NO: 1080 - protein, 32 aa, Artificial Sequence
  Synthetic Peptide
RWPESPKAQASSVPTAQPQAEGSLAKATTAPA

SEQ ID NO: 1081 - protein, 31 aa, Artificial Sequence
  Synthetic Peptide
EKEKEEQEERETKTPECPSHTQPLGVYLLTP

SEQ ID NO: 1082 - protein, 31 aa, Artificial Sequence
  Synthetic Peptide
KEKEKEEQEERETKTPECPSHTQPLGVYLLT

SEQ ID NO: 1083 - protein, 31 aa, Artificial Sequence
  Synthetic Peptide
KKEKEKEEQEERETKTPECPSHTQPLGVYLL

SEQ ID NO: 1084 - protein, 31 aa, Artificial Sequence
  Synthetic Peptide
KKKEKEKEEQEERETKTPECPSHTQPLGVYL

SEQ ID NO: 1085 - protein, 31 aa, Artificial Sequence
  Synthetic Peptide
EKKKEKEKEEQEERETKTPECPSHTQPLGVY

SEQ ID NO: 1086 - protein, 31 aa, Artificial Sequence
  Synthetic Peptide
EEKKKEKEKEEQEERETKTPECPSHTQPLGV

SEQ ID NO: 1087 - protein, 31 aa, Artificial Sequence
  Synthetic Peptide
GEEKKKEKEKEEQEERETKTPECPSHTQPLG

SEQ ID NO: 1088 - protein, 31 aa, Artificial Sequence
  Synthetic Peptide
GGEEKKKEKEKEEQEERETKTPECPSHTQPL

SEQ ID NO: 1089 - protein, 31 aa, Artificial Sequence
  Synthetic Peptide
RGGEEKKKEKEKEEQEERETKTPECPSHTQP

SEQ ID NO: 1090 - protein, 31 aa, Artificial Sequence
  Synthetic Peptide
GRGGEEKKKEKEKEEQEERETKTPECPSHTQ

SEQ ID NO: 1091 - protein, 31 aa, Artificial Sequence
  Synthetic Peptide
TGRGGEEKKKEKEKEEQEERETKTPECPSHT

SEQ ID NO: 1092 - protein, 31 aa, Artificial Sequence
  Synthetic Peptide
NTGRGGEEKKKEKEKEEQEERETKTPECPSH

SEQ ID NO: 1093 - protein, 31 aa, Artificial Sequence
  Synthetic Peptide
RNTGRGGEEKKKEKEKEEQEERETKTPECPS

SEQ ID NO: 1094 - protein, 31 aa, Artificial Sequence
  Synthetic Peptide
TRNTGRGGEEKKKEKEKEEQEERETKTPECP

SEQ ID NO: 1095 - protein, 31 aa, Artificial Sequence
  Synthetic Peptide
TTRNTGRGGEEKKKEKEKEEQEERETKTPEC

SEQ ID NO: 1096 - protein, 31 aa, Artificial Sequence
  Synthetic Peptide
ATTRNTGRGGEEKKKEKEKEEQEERETKTPE

SEQ ID NO: 1097 - protein, 31 aa, Artificial Sequence
  Synthetic Peptide
PATTRNTGRGGEEKKKEKEKEEQEERETKTP

SEQ ID NO: 1098 - protein, 31 aa, Artificial Sequence
  Synthetic Peptide
APATTRNTGRGGEEKKKEKEKEEQEERETKT

SEQ ID NO: 1099 - protein, 31 aa, Artificial Sequence
  Synthetic Peptide
TAPATTRNTGRGGEEKKKEKEKEEQEERETK

SEQ ID NO: 1100 - protein, 31 aa, Artificial Sequence
  Synthetic Peptide
TTAPATTRNTGRGGEEKKKEKEKEEQEERET

SEQ ID NO: 1101 - protein, 31 aa, Artificial Sequence
  Synthetic Peptide
ATTAPATTRNTGRGGEEKKKEKEKEEQEERE

SEQ ID NO: 1102 - protein, 31 aa, Artificial Sequence
  Synthetic Peptide
KATTAPATTRNTGRGGEEKKKEKEKEEQEER

SEQ ID NO: 1103 - protein, 31 aa, Artificial Sequence
  Synthetic Peptide
AKATTAPATTRNTGRGGEEKKKEKEKEEQEE

SEQ ID NO: 1104 - protein, 31 aa, Artificial Sequence
  Synthetic Peptide
LAKATTAPATTRNTGRGGEEKKKEKEKEEQE

SEQ ID NO: 1105 - protein, 31 aa, Artificial Sequence
  Synthetic Peptide
SLAKATTAPATTRNTGRGGEEKKKEKEKEEQ

SEQ ID NO: 1106 - protein, 31 aa, Artificial Sequence
  Synthetic Peptide
GSLAKATTAPATTRNTGRGGEEKKKEKEKEE

SEQ ID NO: 1107 - protein, 31 aa, Artificial Sequence
  Synthetic Peptide
EGSLAKATTAPATTRNTGRGGEEKKKEKEKE

SEQ ID NO: 1108 - protein, 31 aa, Artificial Sequence
  Synthetic Peptide
AEGSLAKATTAPATTRNTGRGGEEKKKEKEK

SEQ ID NO: 1109 - protein, 31 aa, Artificial Sequence
  Synthetic Peptide
QAEGSLAKATTAPATTRNTGRGGEEKKKEKE

SEQ ID NO: 1110 - protein, 31 aa, Artificial Sequence
  Synthetic Peptide
PQAEGSLAKATTAPATTRNTGRGGEEKKKEK

SEQ ID NO: 1111 - protein, 31 aa, Artificial Sequence
  Synthetic Peptide
QPQAEGSLAKATTAPATTRNTGRGGEEKKKE

SEQ ID NO: 1112 - protein, 31 aa, Artificial Sequence
  Synthetic Peptide
AQPQAEGSLAKATTAPATTRNTGRGGEEKKK

SEQ ID NO: 1113 - protein, 31 aa, Artificial Sequence
  Synthetic Peptide
TAQPQAEGSLAKATTAPATTRNTGRGGEEKK

SEQ ID NO: 1114 - protein, 31 aa, Artificial Sequence
  Synthetic Peptide
PTAQPQAEGSLAKATTAPATTRNTGRGGEEK

SEQ ID NO: 1115 - protein, 31 aa, Artificial Sequence
  Synthetic Peptide
VPTAQPQAEGSLAKATTAPATTRNTGRGGEE

SEQ ID NO: 1116 - protein, 31 aa, Artificial Sequence
  Synthetic Peptide
SVPTAQPQAEGSLAKATTAPATTRNTGRGGE

SEQ ID NO: 1117 - protein, 31 aa, Artificial Sequence
  Synthetic Peptide
SSVPTAQPQAEGSLAKATTAPATTRNTGRGG

SEQ ID NO: 1118 - protein, 31 aa, Artificial Sequence
  Synthetic Peptide
ASSVPTAQPQAEGSLAKATTAPATTRNTGRG

SEQ ID NO: 1119 - protein, 31 aa, Artificial Sequence
  Synthetic Peptide
AQASSVPTAQPQAEGSLAKATTAPATTRNTG

SEQ ID NO: 1120 - protein, 31 aa, Artificial Sequence
  Synthetic Peptide
KAQASSVPTAQPQAEGSLAKATTAPATTRNT

SEQ ID NO: 1121 - protein, 31 aa, Artificial Sequence
  Synthetic Peptide
PKAQASSVPTAQPQAEGSLAKATTAPATTRN

SEQ ID NO: 1122 - protein, 31 aa, Artificial Sequence
  Synthetic Peptide
SPKAQASSVPTAQPQAEGSLAKATTAPATTR

SEQ ID NO: 1123 - protein, 31 aa, Artificial Sequence
  Synthetic Peptide
ESPKAQASSVPTAQPQAEGSLAKATTAPATT

SEQ ID NO: 1124 - protein, 31 aa, Artificial Sequence
  Synthetic Peptide
PESPKAQASSVPTAQPQAEGSLAKATTAPAT

SEQ ID NO: 1125 - protein, 31 aa, Artificial Sequence
  Synthetic Peptide
WPESPKAQASSVPTAQPQAEGSLAKATTAPA

SEQ ID NO: 1126 - protein, 31 aa, Artificial Sequence
  Synthetic Peptide
RWPESPKAQASSVPTAQPQAEGSLAKATTAP

SEQ ID NO: 1127 - protein, 30 aa, Artificial Sequence
  Synthetic Peptide
KEKEEQEERETKTPECPSHTQPLGVYLLTP

SEQ ID NO: 1128 - protein, 30 aa, Artificial Sequence
  Synthetic Peptide
EKEKEEQEERETKTPECPSHTQPLGVYLLT

SEQ ID NO: 1129 - protein, 30 aa, Artificial Sequence
  Synthetic Peptide
KEKEKEEQEERETKTPECPSHTQPLGVYLL

SEQ ID NO: 1130 - protein, 30 aa, Artificial Sequence
  Synthetic Peptide
KKEKEKEEQEERETKTPECPSHTQPLGVYL

SEQ ID NO: 1131 - protein, 30 aa, Artificial Sequence
  Synthetic Peptide
KKKEKEKEEQEERETKTPECPSHTQPLGVY

SEQ ID NO: 1132 - protein, 30 aa, Artificial Sequence
  Synthetic Peptide
EKKKEKEKEEQEERETKTPECPSHTQPLGV

SEQ ID NO: 1133 - protein, 30 aa, Artificial Sequence
  Synthetic Peptide
EEKKKEKEKEEQEERETKTPECPSHTQPLG

SEQ ID NO: 1134 - protein, 30 aa, Artificial Sequence
  Synthetic Peptide
GEEKKKEKEKEEQEERETKTPECPSHTQPL

SEQ ID NO: 1135 - protein, 30 aa, Artificial Sequence
  Synthetic Peptide
GGEEKKKEKEKEEQEERETKTPECPSHTQP

SEQ ID NO: 1136 - protein, 30 aa, Artificial Sequence
  Synthetic Peptide
RGGEEKKKEKEKEEQEERETKTPECPSHTQ

SEQ ID NO: 1137 - protein, 30 aa, Artificial Sequence
  Synthetic Peptide
GRGGEEKKKEKEKEEQEERETKTPECPSHT

SEQ ID NO: 1138 - protein, 30 aa, Artificial Sequence
  Synthetic Peptide
TGRGGEEKKKEKEKEEQEERETKTPECPSH

SEQ ID NO: 1139 - protein, 30 aa, Artificial Sequence
  Synthetic Peptide
NTGRGGEEKKKEKEKEEQEERETKTPECPS

SEQ ID NO: 1140 - protein, 30 aa, Artificial Sequence
  Synthetic Peptide
RNTGRGGEEKKKEKEKEEQEERETKTPECP

SEQ ID NO: 1141 - protein, 30 aa, Artificial Sequence
  Synthetic Peptide
TRNTGRGGEEKKKEKEKEEQEERETKTPEC

SEQ ID NO: 1142 - protein, 30 aa, Artificial Sequence
  Synthetic Peptide
TTRNTGRGGEEKKKEKEKEEQEERETKTPE

SEQ ID NO: 1143 - protein, 30 aa, Artificial Sequence
  Synthetic Peptide
ATTRNTGRGGEEKKKEKEKEEQEERETKTP

SEQ ID NO: 1144 - protein, 30 aa, Artificial Sequence
  Synthetic Peptide
PATTRNTGRGGEEKKKEKEKEEQEERETKT

SEQ ID NO: 1145 - protein, 30 aa, Artificial Sequence
  Synthetic Peptide
APATTRNTGRGGEEKKKEKEKEEQEERETK

SEQ ID NO: 1146 - protein, 30 aa, Artificial Sequence
  Synthetic Peptide
TAPATTRNTGRGGEEKKKEKEKEEQEERET

SEQ ID NO: 1147 - protein, 30 aa, Artificial Sequence
  Synthetic Peptide
TTAPATTRNTGRGGEEKKKEKEKEEQEERE

SEQ ID NO: 1148 - protein, 30 aa, Artificial Sequence
  Synthetic Peptide
ATTAPATTRNTGRGGEEKKKEKEKEEQEER

SEQ ID NO: 1149 - protein, 30 aa, Artificial Sequence
  Synthetic Peptide
KATTAPATTRNTGRGGEEKKKEKEKEEQEE

SEQ ID NO: 1150 - protein, 30 aa, Artificial Sequence
  Synthetic Peptide
AKATTAPATTRNTGRGGEEKKKEKEKEEQE

SEQ ID NO: 1151 - protein, 30 aa, Artificial Sequence
  Synthetic Peptide
LAKATTAPATTRNTGRGGEEKKKEKEKEEQ

SEQ ID NO: 1152 - protein, 30 aa, Artificial Sequence
  Synthetic Peptide
SLAKATTAPATTRNTGRGGEEKKKEKEKEE

SEQ ID NO: 1153 - protein, 30 aa, Artificial Sequence
  Synthetic Peptide
GSLAKATTAPATTRNTGRGGEEKKKEKEKE

SEQ ID NO: 1154 - protein, 30 aa, Artificial Sequence
  Synthetic Peptide
EGSLAKATTAPATTRNTGRGGEEKKKEKEK

SEQ ID NO: 1155 - protein, 30 aa, Artificial Sequence
  Synthetic Peptide
AEGSLAKATTAPATTRNTGRGGEEKKKEKE

SEQ ID NO: 1156 - protein, 30 aa, Artificial Sequence
  Synthetic Peptide
QAEGSLAKATTAPATTRNTGRGGEEKKKEK

SEQ ID NO: 1157 - protein, 30 aa, Artificial Sequence
  Synthetic Peptide
PQAEGSLAKATTAPATTRNTGRGGEEKKKE

SEQ ID NO: 1158 - protein, 30 aa, Artificial Sequence
  Synthetic Peptide
QPQAEGSLAKATTAPATTRNTGRGGEEKKK

SEQ ID NO: 1159 - protein, 30 aa, Artificial Sequence
  Synthetic Peptide
AQPQAEGSLAKATTAPATTRNTGRGGEEKK

SEQ ID NO: 1160 - protein, 30 aa, Artificial Sequence
  Synthetic Peptide
TAQPQAEGSLAKATTAPATTRNTGRGGEEK

SEQ ID NO: 1161 - protein, 30 aa, Artificial Sequence
  Synthetic Peptide
PTAQPQAEGSLAKATTAPATTRNTGRGGEE

SEQ ID NO: 1162 - protein, 30 aa, Artificial Sequence
  Synthetic Peptide
VPTAQPQAEGSLAKATTAPATTRNTGRGGE

SEQ ID NO: 1163 - protein, 30 aa, Artificial Sequence
  Synthetic Peptide
SVPTAQPQAEGSLAKATTAPATTRNTGRGG

SEQ ID NO: 1164 - protein, 30 aa, Artificial Sequence
  Synthetic Peptide
SSVPTAQPQAEGSLAKATTAPATTRNTGRG

SEQ ID NO: 1165 - protein, 30 aa, Artificial Sequence
  Synthetic Peptide
ASSVPTAQPQAEGSLAKATTAPATTRNTGR

SEQ ID NO: 1166 - protein, 30 aa, Artificial Sequence
  Synthetic Peptide
QASSVPTAQPQAEGSLAKATTAPATTRNTG

SEQ ID NO: 1167 - protein, 30 aa, Artificial Sequence
  Synthetic Peptide
AQASSVPTAQPQAEGSLAKATTAPATTRNT

SEQ ID NO: 1168 - protein, 30 aa, Artificial Sequence
  Synthetic Peptide
KAQASSVPTAQPQAEGSLAKATTAPATTRN

SEQ ID NO: 1169 - protein, 30 aa, Artificial Sequence
  Synthetic Peptide
PKAQASSVPTAQPQAEGSLAKATTAPATTR

SEQ ID NO: 1170 - protein, 30 aa, Artificial Sequence
  Synthetic Peptide
SPKAQASSVPTAQPQAEGSLAKATTAPATT

SEQ ID NO: 1171 - protein, 30 aa, Artificial Sequence
  Synthetic Peptide
ESPKAQASSVPTAQPQAEGSLAKATTAPAT

SEQ ID NO: 1172 - protein, 30 aa, Artificial Sequence
  Synthetic Peptide
PESPKAQASSVPTAQPQAEGSLAKATTAPA

SEQ ID NO: 1173 - protein, 30 aa, Artificial Sequence
  Synthetic Peptide
WPESPKAQASSVPTAQPQAEGSLAKATTAP

SEQ ID NO: 1174 - protein, 30 aa, Artificial Sequence
  Synthetic Peptide
RWPESPKAQASSVPTAQPQAEGSLAKATTA

SEQ ID NO: 1175 - protein, 29 aa, Artificial Sequence
  Synthetic Peptide
EKEEQEERETKTPECPSHTQPLGVYLLTP

SEQ ID NO: 1176 - protein, 29 aa, Artificial Sequence
  Synthetic Peptide
KEKEEQEERETKTPECPSHTQPLGVYLLT

SEQ ID NO: 1177 - protein, 29 aa, Artificial Sequence
  Synthetic Peptide
EKEKEEQEERETKTPECPSHTQPLGVYLL

SEQ ID NO: 1178 - protein, 29 aa, Artificial Sequence
  Synthetic Peptide
KEKEKEEQEERETKTPECPSHTQPLGVYL

SEQ ID NO: 1179 - protein, 29 aa, Artificial Sequence
  Synthetic Peptide
KKEKEKEEQEERETKTPECPSHTQPLGVY

SEQ ID NO: 1180 - protein, 29 aa, Artificial Sequence
  Synthetic Peptide
KKKEKEKEEQEERETKTPECPSHTQPLGV

SEQ ID NO: 1181 - protein, 29 aa, Artificial Sequence
  Synthetic Peptide
EKKKEKEKEEQEERETKTPECPSHTQPLG

SEQ ID NO: 1182 - protein, 29 aa, Artificial Sequence
  Synthetic Peptide
EEKKKEKEKEEQEERETKTPECPSHTQPL

SEQ ID NO: 1183 - protein, 29 aa, Artificial Sequence
  Synthetic Peptide
GEEKKKEKEKEEQEERETKTPECPSHTQP

SEQ ID NO: 1184 - protein, 29 aa, Artificial Sequence
  Synthetic Peptide
GGEEKKKEKEKEEQEERETKTPECPSHTQ

SEQ ID NO: 1185 - protein, 29 aa, Artificial Sequence
  Synthetic Peptide
RGGEEKKKEKEKEEQEERETKTPECPSHT

SEQ ID NO: 1186 - protein, 29 aa, Artificial Sequence
  Synthetic Peptide
GRGGEEKKKEKEKEEQEERETKTPECPSH

SEQ ID NO: 1187 - protein, 29 aa, Artificial Sequence
  Synthetic Peptide
TGRGGEEKKKEKEKEEQEERETKTPECPS

SEQ ID NO: 1188 - protein, 29 aa, Artificial Sequence
  Synthetic Peptide
NTGRGGEEKKKEKEKEEQEERETKTPECP

SEQ ID NO: 1189 - protein, 29 aa, Artificial Sequence
  Synthetic Peptide
RNTGRGGEEKKKEKEKEEQEERETKTPEC

SEQ ID NO: 1190 - protein, 29 aa, Artificial Sequence
  Synthetic Peptide
TRNTGRGGEEKKKEKEKEEQEERETKTPE

SEQ ID NO: 1191 - protein, 29 aa, Artificial Sequence
  Synthetic Peptide
TTRNTGRGGEEKKKEKEKEEQEERETKTP

SEQ ID NO: 1192 - protein, 29 aa, Artificial Sequence
  Synthetic Peptide
ATTRNTGRGGEEKKKEKEKEEQEERETKT

SEQ ID NO: 1193 - protein, 29 aa, Artificial Sequence
  Synthetic Peptide
PATTRNTGRGGEEKKKEKEKEEQEERETK

SEQ ID NO: 1194 - protein, 29 aa, Artificial Sequence
  Synthetic Peptide
APATTRNTGRGGEEKKKEKEKEEQEERET

SEQ ID NO: 1195 - protein, 29 aa, Artificial Sequence
  Synthetic Peptide
TAPATTRNTGRGGEEKKKEKEKEEQEERE

SEQ ID NO: 1196 - protein, 29 aa, Artificial Sequence
  Synthetic Peptide
TTAPATTRNTGRGGEEKKKEKEKEEQEER

SEQ ID NO: 1197 - protein, 29 aa, Artificial Sequence
  Synthetic Peptide
ATTAPATTRNTGRGGEEKKKEKEKEEQEE

SEQ ID NO: 1198 - protein, 29 aa, Artificial Sequence
  Synthetic Peptide
KATTAPATTRNTGRGGEEKKKEKEKEEQE

SEQ ID NO: 1199 - protein, 29 aa, Artificial Sequence
  Synthetic Peptide
AKATTAPATTRNTGRGGEEKKKEKEKEEQ

SEQ ID NO: 1200 - protein, 29 aa, Artificial Sequence
  Synthetic Peptide
LAKATTAPATTRNTGRGGEEKKKEKEKEE

SEQ ID NO: 1201 - protein, 29 aa, Artificial Sequence
  Synthetic Peptide
SLAKATTAPATTRNTGRGGEEKKKEKEKE

SEQ ID NO: 1202 - protein, 29 aa, Artificial Sequence
  Synthetic Peptide
GSLAKATTAPATTRNTGRGGEEKKKEKEK

SEQ ID NO: 1203 - protein, 29 aa, Artificial Sequence
  Synthetic Peptide
EGSLAKATTAPATTRNTGRGGEEKKKEKE

SEQ ID NO: 1204 - protein, 29 aa, Artificial Sequence
  Synthetic Peptide
AEGSLAKATTAPATTRNTGRGGEEKKKEK

SEQ ID NO: 1205 - protein, 29 aa, Artificial Sequence
  Synthetic Peptide
QAEGSLAKATTAPATTRNTGRGGEEKKKE

SEQ ID NO: 1206 - protein, 29 aa, Artificial Sequence
  Synthetic Peptide
PQAEGSLAKATTAPATTRNTGRGGEEKKK

SEQ ID NO: 1207 - protein, 29 aa, Artificial Sequence
  Synthetic Peptide
QPQAEGSLAKATTAPATTRNTGRGGEEKK

SEQ ID NO: 1208 - protein, 29 aa, Artificial Sequence
  Synthetic Peptide
AQPQAEGSLAKATTAPATTRNTGRGGEEK

SEQ ID NO: 1209 - protein, 29 aa, Artificial Sequence
  Synthetic Peptide
TAQPQAEGSLAKATTAPATTRNTGRGGEE

SEQ ID NO: 1210 - protein, 29 aa, Artificial Sequence
  Synthetic Peptide
PTAQPQAEGSLAKATTAPATTRNTGRGGE

SEQ ID NO: 1211 - protein, 29 aa, Artificial Sequence
  Synthetic Peptide
VPTAQPQAEGSLAKATTAPATTRNTGRGG

SEQ ID NO: 1212 - protein, 29 aa, Artificial Sequence
  Synthetic Peptide
SVPTAQPQAEGSLAKATTAPATTRNTGRG

SEQ ID NO: 1213 - protein, 29 aa, Artificial Sequence
  Synthetic Peptide
SSVPTAQPQAEGSLAKATTAPATTRNTGR

SEQ ID NO: 1214 - protein, 29 aa, Artificial Sequence
  Synthetic Peptide
ASSVPTAQPQAEGSLAKATTAPATTRNTG

SEQ ID NO: 1215 - protein, 29 aa, Artificial Sequence
  Synthetic Peptide
QASSVPTAQPQAEGSLAKATTAPATTRNT

SEQ ID NO: 1216 - protein, 29 aa, Artificial Sequence
  Synthetic Peptide
AQASSVPTAQPQAEGSLAKATTAPATTRN

SEQ ID NO: 1217 - protein, 29 aa, Artificial Sequence
  Synthetic Peptide
KAQASSVPTAQPQAEGSLAKATTAPATTR

SEQ ID NO: 1218 - protein, 29 aa, Artificial Sequence
  Synthetic Peptide
PKAQASSVPTAQPQAEGSLAKATTAPATT

SEQ ID NO: 1219 - protein, 29 aa, Artificial Sequence
  Synthetic Peptide
SPKAQASSVPTAQPQAEGSLAKATTAPAT

SEQ ID NO: 1220 - protein, 29 aa, Artificial Sequence
  Synthetic Peptide
ESPKAQASSVPTAQPQAEGSLAKATTAPA

SEQ ID NO: 1221 - protein, 29 aa, Artificial Sequence
  Synthetic Peptide
PESPKAQASSVPTAQPQAEGSLAKATTAP

SEQ ID NO: 1222 - protein, 29 aa, Artificial Sequence
  Synthetic Peptide
WPESPKAQASSVPTAQPQAEGSLAKATTA

SEQ ID NO: 1223 - protein, 29 aa, Artificial Sequence
  Synthetic Peptide
RWPESPKAQASSVPTAQPQAEGSLAKATT

SEQ ID NO: 1224 - protein, 28 aa, Artificial Sequence
  Synthetic Peptide
KEEQEERETKTPECPSHTQPLGVYLLTP

SEQ ID NO: 1225 - protein, 28 aa, Artificial Sequence
  Synthetic Peptide
EKEEQEERETKTPECPSHTQPLGVYLLT

SEQ ID NO: 1226 - protein, 28 aa, Artificial Sequence
  Synthetic Peptide
KEKEEQEERETKTPECPSHTQPLGVYLL

SEQ ID NO: 1227 - protein, 28 aa, Artificial Sequence
  Synthetic Peptide
EKEKEEQEERETKTPECPSHTQPLGVYL

SEQ ID NO: 1228 - protein, 28 aa, Artificial Sequence
  Synthetic Peptide
KEKEKEEQEERETKTPECPSHTQPLGVY

SEQ ID NO: 1229 - protein, 28 aa, Artificial Sequence
  Synthetic Peptide
KKEKEKEEQEERETKTPECPSHTQPLGV

SEQ ID NO: 1230 - protein, 28 aa, Artificial Sequence
  Synthetic Peptide
KKKEKEKEEQEERETKTPECPSHTQPLG

SEQ ID NO: 1231 - protein, 28 aa, Artificial Sequence
  Synthetic Peptide
EKKKEKEKEEQEERETKTPECPSHTQPL

SEQ ID NO: 1232 - protein, 28 aa, Artificial Sequence
  Synthetic Peptide
EEKKKEKEKEEQEERETKTPECPSHTQP

SEQ ID NO: 1233 - protein, 28 aa, Artificial Sequence
  Synthetic Peptide
GEEKKKEKEKEEQEERETKTPECPSHTQ

SEQ ID NO: 1234 - protein, 28 aa, Artificial Sequence
  Synthetic Peptide
GGEEKKKEKEKEEQEERETKTPECPSHT

SEQ ID NO: 1235 - protein, 28 aa, Artificial Sequence
  Synthetic Peptide
RGGEEKKKEKEKEEQEERETKTPECPSH

SEQ ID NO: 1236 - protein, 28 aa, Artificial Sequence
  Synthetic Peptide
GRGGEEKKKEKEKEEQEERETKTPECPS

SEQ ID NO: 1237 - protein, 28 aa, Artificial Sequence
  Synthetic Peptide
TGRGGEEKKKEKEKEEQEERETKTPECP

SEQ ID NO: 1238 - protein, 28 aa, Artificial Sequence
  Synthetic Peptide
NTGRGGEEKKKEKEKEEQEERETKTPEC

SEQ ID NO: 1239 - protein, 28 aa, Artificial Sequence
  Synthetic Peptide
RNTGRGGEEKKKEKEKEEQEERETKTPE

SEQ ID NO: 1240 - protein, 28 aa, Artificial Sequence
  Synthetic Peptide
TRNTGRGGEEKKKEKEKEEQEERETKTP

SEQ ID NO: 1241 - protein, 28 aa, Artificial Sequence
  Synthetic Peptide
TTRNTGRGGEEKKKEKEKEEQEERETKT

SEQ ID NO: 1242 - protein, 28 aa, Artificial Sequence
  Synthetic Peptide
ATTRNTGRGGEEKKKEKEKEEQEERETK

SEQ ID NO: 1243 - protein, 28 aa, Artificial Sequence
  Synthetic Peptide
PATTRNTGRGGEEKKKEKEKEEQEERET

SEQ ID NO: 1244 - protein, 28 aa, Artificial Sequence
  Synthetic Peptide
APATTRNTGRGGEEKKKEKEKEEQEERE

SEQ ID NO: 1245 - protein, 28 aa, Artificial Sequence
  Synthetic Peptide
TAPATTRNTGRGGEEKKKEKEKEEQEER

SEQ ID NO: 1246 - protein, 28 aa, Artificial Sequence
  Synthetic Peptide
TTAPATTRNTGRGGEEKKKEKEKEEQEE

SEQ ID NO: 1247 - protein, 28 aa, Artificial Sequence
  Synthetic Peptide
ATTAPATTRNTGRGGEEKKKEKEKEEQE

SEQ ID NO: 1248 - protein, 28 aa, Artificial Sequence
  Synthetic Peptide
KATTAPATTRNTGRGGEEKKKEKEKEEQ

SEQ ID NO: 1249 - protein, 28 aa, Artificial Sequence
  Synthetic Peptide
AKATTAPATTRNTGRGGEEKKKEKEKEE

SEQ ID NO: 1250 - protein, 28 aa, Artificial Sequence
  Synthetic Peptide
LAKATTAPATTRNTGRGGEEKKKEKEKE

SEQ ID NO: 1251 - protein, 28 aa, Artificial Sequence
  Synthetic Peptide
SLAKATTAPATTRNTGRGGEEKKKEKEK

SEQ ID NO: 1252 - protein, 28 aa, Artificial Sequence
  Synthetic Peptide
GSLAKATTAPATTRNTGRGGEEKKKEKE

SEQ ID NO: 1253 - protein, 28 aa, Artificial Sequence
  Synthetic Peptide
EGSLAKATTAPATTRNTGRGGEEKKKEK

SEQ ID NO: 1254 - protein, 28 aa, Artificial Sequence
  Synthetic Peptide
AEGSLAKATTAPATTRNTGRGGEEKKKE

SEQ ID NO: 1255 - protein, 28 aa, Artificial Sequence
  Synthetic Peptide
QAEGSLAKATTAPATTRNTGRGGEEKKK

SEQ ID NO: 1256 - protein, 28 aa, Artificial Sequence
  Synthetic Peptide
PQAEGSLAKATTAPATTRNTGRGGEEKK

SEQ ID NO: 1257 - protein, 28 aa, Artificial Sequence
  Synthetic Peptide
QPQAEGSLAKATTAPATTRNTGRGGEEK

SEQ ID NO: 1258 - protein, 28 aa, Artificial Sequence
  Synthetic Peptide
AQPQAEGSLAKATTAPATTRNTGRGGEE

SEQ ID NO: 1259 - protein, 28 aa, Artificial Sequence
  Synthetic Peptide
TAQPQAEGSLAKATTAPATTRNTGRGGE

SEQ ID NO: 1260 - protein, 28 aa, Artificial Sequence
  Synthetic Peptide
PTAQPQAEGSLAKATTAPATTRNTGRGG

SEQ ID NO: 1261 - protein, 28 aa, Artificial Sequence
  Synthetic Peptide
VPTAQPQAEGSLAKATTAPATTRNTGRG

SEQ ID NO: 1262 - protein, 28 aa, Artificial Sequence
  Synthetic Peptide
SVPTAQPQAEGSLAKATTAPATTRNTGR

SEQ ID NO: 1263 - protein, 28 aa, Artificial Sequence
  Synthetic Peptide
SSVPTAQPQAEGSLAKATTAPATTRNTG

SEQ ID NO: 1264 - protein, 28 aa, Artificial Sequence
  Synthetic Peptide
ASSVPTAQPQAEGSLAKATTAPATTRNT

SEQ ID NO: 1265 - protein, 28 aa, Artificial Sequence
  Synthetic Peptide
QASSVPTAQPQAEGSLAKATTAPATTRN

SEQ ID NO: 1266 - protein, 28 aa, Artificial Sequence
  Synthetic Peptide
AQASSVPTAQPQAEGSLAKATTAPATTR

SEQ ID NO: 1267 - protein, 28 aa, Artificial Sequence
  Synthetic Peptide
KAQASSVPTAQPQAEGSLAKATTAPATT

SEQ ID NO: 1268 - protein, 28 aa, Artificial Sequence
  Synthetic Peptide
PKAQASSVPTAQPQAEGSLAKATTAPAT

SEQ ID NO: 1269 - protein, 28 aa, Artificial Sequence
  Synthetic Peptide
SPKAQASSVPTAQPQAEGSLAKATTAPA

SEQ ID NO: 1270 - protein, 28 aa, Artificial Sequence
  Synthetic Peptide
ESPKAQASSVPTAQPQAEGSLAKATTAP

SEQ ID NO: 1271 - protein, 28 aa, Artificial Sequence
  Synthetic Peptide
PESPKAQASSVPTAQPQAEGSLAKATTA

SEQ ID NO: 1272 - protein, 28 aa, Artificial Sequence
  Synthetic Peptide
WPESPKAQASSVPTAQPQAEGSLAKATT

SEQ ID NO: 1273 - protein, 28 aa, Artificial Sequence
  Synthetic Peptide
RWPESPKAQASSVPTAQPQAEGSLAKAT

SEQ ID NO: 1274 - protein, 27 aa, Artificial Sequence
  Synthetic Peptide
EEQEERETKTPECPSHTQPLGVYLLTP

SEQ ID NO: 1275 - protein, 27 aa, Artificial Sequence
  Synthetic Peptide
KEEQEERETKTPECPSHTQPLGVYLLT

SEQ ID NO: 1276 - protein, 27 aa, Artificial Sequence
  Synthetic Peptide
EKEEQEERETKTPECPSHTQPLGVYLL

SEQ ID NO: 1277 - protein, 27 aa, Artificial Sequence
  Synthetic Peptide
KEKEEQEERETKTPECPSHTQPLGVYL

SEQ ID NO: 1278 - protein, 27 aa, Artificial Sequence
  Synthetic Peptide
EKEKEEQEERETKTPECPSHTQPLGVY

SEQ ID NO: 1279 - protein, 27 aa, Artificial Sequence
  Synthetic Peptide
KEKEKEEQEERETKTPECPSHTQPLGV

SEQ ID NO: 1280 - protein, 27 aa, Artificial Sequence
  Synthetic Peptide
KKEKEKEEQEERETKTPECPSHTQPLG

SEQ ID NO: 1281 - protein, 27 aa, Artificial Sequence
  Synthetic Peptide
KKKEKEKEEQEERETKTPECPSHTQPL

SEQ ID NO: 1282 - protein, 27 aa, Artificial Sequence
  Synthetic Peptide
EKKKEKEKEEQEERETKTPECPSHTQP

SEQ ID NO: 1283 - protein, 27 aa, Artificial Sequence
  Synthetic Peptide
EEKKKEKEKEEQEERETKTPECPSHTQ

SEQ ID NO: 1284 - protein, 27 aa, Artificial Sequence
  Synthetic Peptide
GEEKKKEKEKEEQEERETKTPECPSHT

SEQ ID NO: 1285 - protein, 27 aa, Artificial Sequence
  Synthetic Peptide
GGEEKKKEKEKEEQEERETKTPECPSH

SEQ ID NO: 1286 - protein, 27 aa, Artificial Sequence
  Synthetic Peptide
RGGEEKKKEKEKEEQEERETKTPECPS

SEQ ID NO: 1287 - protein, 27 aa, Artificial Sequence
  Synthetic Peptide
GRGGEEKKKEKEKEEQEERETKTPECP

SEQ ID NO: 1288 - protein, 27 aa, Artificial Sequence
  Synthetic Peptide
TGRGGEEKKKEKEKEEQEERETKTPEC

SEQ ID NO: 1289 - protein, 27 aa, Artificial Sequence
  Synthetic Peptide
NTGRGGEEKKKEKEKEEQEERETKTPE

SEQ ID NO: 1290 - protein, 27 aa, Artificial Sequence
  Synthetic Peptide
RNTGRGGEEKKKEKEKEEQEERETKTP

SEQ ID NO: 1291 - protein, 27 aa, Artificial Sequence
  Synthetic Peptide
TRNTGRGGEEKKKEKEKEEQEERETKT

SEQ ID NO: 1292 - protein, 27 aa, Artificial Sequence
  Synthetic Peptide
TTRNTGRGGEEKKKEKEKEEQEERETK

SEQ ID NO: 1293 - protein, 27 aa, Artificial Sequence
  Synthetic Peptide
ATTRNTGRGGEEKKKEKEKEEQEERET

SEQ ID NO: 1294 - protein, 27 aa, Artificial Sequence
  Synthetic Peptide
PATTRNTGRGGEEKKKEKEKEEQEERE

SEQ ID NO: 1295 - protein, 27 aa, Artificial Sequence
  Synthetic Peptide
APATTRNTGRGGEEKKKEKEKEEQEER

SEQ ID NO: 1296 - protein, 27 aa, Artificial Sequence
  Synthetic Peptide
TAPATTRNTGRGGEEKKKEKEKEEQEE

SEQ ID NO: 1297 - protein, 27 aa, Artificial Sequence
  Synthetic Peptide
TTAPATTRNTGRGGEEKKKEKEKEEQE

SEQ ID NO: 1298 - protein, 27 aa, Artificial Sequence
  Synthetic Peptide
ATTAPATTRNTGRGGEEKKKEKEKEEQ

SEQ ID NO: 1299 - protein, 27 aa, Artificial Sequence
  Synthetic Peptide
KATTAPATTRNTGRGGEEKKKEKEKEE

SEQ ID NO: 1300 - protein, 27 aa, Artificial Sequence
  Synthetic Peptide
AKATTAPATTRNTGRGGEEKKKEKEKE

SEQ ID NO: 1301 - protein, 27 aa, Artificial Sequence
  Synthetic Peptide
LAKATTAPATTRNTGRGGEEKKKEKEK

SEQ ID NO: 1302 - protein, 27 aa, Artificial Sequence
  Synthetic Peptide
SLAKATTAPATTRNTGRGGEEKKKEKE

SEQ ID NO: 1303 - protein, 27 aa, Artificial Sequence
  Synthetic Peptide
GSLAKATTAPATTRNTGRGGEEKKKEK

SEQ ID NO: 1304 - protein, 27 aa, Artificial Sequence
  Synthetic Peptide
EGSLAKATTAPATTRNTGRGGEEKKKE

SEQ ID NO: 1305 - protein, 27 aa, Artificial Sequence
  Synthetic Peptide
AEGSLAKATTAPATTRNTGRGGEEKKK

SEQ ID NO: 1306 - protein, 27 aa, Artificial Sequence
  Synthetic Peptide
QAEGSLAKATTAPATTRNTGRGGEEKK

SEQ ID NO: 1307 - protein, 27 aa, Artificial Sequence
  Synthetic Peptide
PQAEGSLAKATTAPATTRNTGRGGEEK

SEQ ID NO: 1308 - protein, 27 aa, Artificial Sequence
  Synthetic Peptide
QPQAEGSLAKATTAPATTRNTGRGGEE

SEQ ID NO: 1309 - protein, 27 aa, Artificial Sequence
  Synthetic Peptide
AQPQAEGSLAKATTAPATTRNTGRGGE

SEQ ID NO: 1310 - protein, 27 aa, Artificial Sequence
  Synthetic Peptide
TAQPQAEGSLAKATTAPATTRNTGRGG

SEQ ID NO: 1311 - protein, 27 aa, Artificial Sequence
  Synthetic Peptide
PTAQPQAEGSLAKATTAPATTRNTGRG

SEQ ID NO: 1312 - protein, 27 aa, Artificial Sequence
  Synthetic Peptide
VPTAQPQAEGSLAKATTAPATTRNTGR

SEQ ID NO: 1313 - protein, 27 aa, Artificial Sequence
  Synthetic Peptide
SVPTAQPQAEGSLAKATTAPATTRNTG

SEQ ID NO: 1314 - protein, 27 aa, Artificial Sequence
  Synthetic Peptide
SSVPTAQPQAEGSLAKATTAPATTRNT

SEQ ID NO: 1315 - protein, 27 aa, Artificial Sequence
  Synthetic Peptide
ASSVPTAQPQAEGSLAKATTAPATTRN

SEQ ID NO: 1316 - protein, 27 aa, Artificial Sequence
  Synthetic Peptide
QASSVPTAQPQAEGSLAKATTAPATTR

SEQ ID NO: 1317 - protein, 27 aa, Artificial Sequence
  Synthetic Peptide
AQASSVPTAQPQAEGSLAKATTAPATT

SEQ ID NO: 1318 - protein, 27 aa, Artificial Sequence
  Synthetic Peptide
KAQASSVPTAQPQAEGSLAKATTAPAT

SEQ ID NO: 1319 - protein, 27 aa, Artificial Sequence
  Synthetic Peptide
PKAQASSVPTAQPQAEGSLAKATTAPA

SEQ ID NO: 1320 - protein, 27 aa, Artificial Sequence
  Synthetic Peptide
SPKAQASSVPTAQPQAEGSLAKATTAP

SEQ ID NO: 1321 - protein, 27 aa, Artificial Sequence
  Synthetic Peptide
ESPKAQASSVPTAQPQAEGSLAKATTA

SEQ ID NO: 1322 - protein, 27 aa, Artificial Sequence
  Synthetic Peptide
PESPKAQASSVPTAQPQAEGSLAKATT

SEQ ID NO: 1323 - protein, 27 aa, Artificial Sequence
  Synthetic Peptide
WPESPKAQASSVPTAQPQAEGSLAKAT

SEQ ID NO: 1324 - protein, 27 aa, Artificial Sequence
  Synthetic Peptide
RWPESPKAQASSVPTAQPQAEGSLAKA

SEQ ID NO: 1325 - protein, 26 aa, Artificial Sequence
  Synthetic Peptide
EQEERETKTPECPSHTQPLGVYLLTP

SEQ ID NO: 1326 - protein, 26 aa, Artificial Sequence
  Synthetic Peptide
EEQEERETKTPECPSHTQPLGVYLLT

SEQ ID NO: 1327 - protein, 26 aa, Artificial Sequence
  Synthetic Peptide
KEEQEERETKTPECPSHTQPLGVYLL

SEQ ID NO: 1328 - protein, 26 aa, Artificial Sequence
  Synthetic Peptide
EKEEQEERETKTPECPSHTQPLGVYL

SEQ ID NO: 1329 - protein, 26 aa, Artificial Sequence
  Synthetic Peptide
KEKEEQEERETKTPECPSHTQPLGVY

SEQ ID NO: 1330 - protein, 26 aa, Artificial Sequence
  Synthetic Peptide
EKEKEEQEERETKTPECPSHTQPLGV

SEQ ID NO: 1331 - protein, 26 aa, Artificial Sequence
  Synthetic Peptide
KEKEKEEQEERETKTPECPSHTQPLG

SEQ ID NO: 1332 - protein, 26 aa, Artificial Sequence
  Synthetic Peptide
KKEKEKEEQEERETKTPECPSHTQPL

SEQ ID NO: 1333 - protein, 26 aa, Artificial Sequence
  Synthetic Peptide
KKKEKEKEEQEERETKTPECPSHTQP

SEQ ID NO: 1334 - protein, 26 aa, Artificial Sequence
  Synthetic Peptide
EKKKEKEKEEQEERETKTPECPSHTQ

SEQ ID NO: 1335 - protein, 26 aa, Artificial Sequence
  Synthetic Peptide
EEKKKEKEKEEQEERETKTPECPSHT

SEQ ID NO: 1336 - protein, 26 aa, Artificial Sequence
  Synthetic Peptide
GEEKKKEKEKEEQEERETKTPECPSH

SEQ ID NO: 1337 - protein, 26 aa, Artificial Sequence
  Synthetic Peptide
GGEEKKKEKEKEEQEERETKTPECPS

SEQ ID NO: 1338 - protein, 26 aa, Artificial Sequence
  Synthetic Peptide
RGGEEKKKEKEKEEQEERETKTPECP

SEQ ID NO: 1339 - protein, 26 aa, Artificial Sequence
  Synthetic Peptide
GRGGEEKKKEKEKEEQEERETKTPEC

SEQ ID NO: 1340 - protein, 26 aa, Artificial Sequence
  Synthetic Peptide
TGRGGEEKKKEKEKEEQEERETKTPE

SEQ ID NO: 1341 - protein, 26 aa, Artificial Sequence
  Synthetic Peptide
NTGRGGEEKKKEKEKEEQEERETKTP

SEQ ID NO: 1342 - protein, 26 aa, Artificial Sequence
  Synthetic Peptide
RNTGRGGEEKKKEKEKEEQEERETKT

SEQ ID NO: 1343 - protein, 26 aa, Artificial Sequence
  Synthetic Peptide
TRNTGRGGEEKKKEKEKEEQEERETK

SEQ ID NO: 1344 - protein, 26 aa, Artificial Sequence
  Synthetic Peptide
TTRNTGRGGEEKKKEKEKEEQEERET

SEQ ID NO: 1345 - protein, 26 aa, Artificial Sequence
  Synthetic Peptide
ATTRNTGRGGEEKKKEKEKEEQEERE

SEQ ID NO: 1346 - protein, 26 aa, Artificial Sequence
  Synthetic Peptide
PATTRNTGRGGEEKKKEKEKEEQEER

SEQ ID NO: 1347 - protein, 26 aa, Artificial Sequence
  Synthetic Peptide
APATTRNTGRGGEEKKKEKEKEEQEE

SEQ ID NO: 1348 - protein, 26 aa, Artificial Sequence
  Synthetic Peptide
TAPATTRNTGRGGEEKKKEKEKEEQE

SEQ ID NO: 1349 - protein, 26 aa, Artificial Sequence
  Synthetic Peptide
TTAPATTRNTGRGGEEKKKEKEKEEQ

SEQ ID NO: 1350 - protein, 26 aa, Artificial Sequence
  Synthetic Peptide
ATTAPATTRNTGRGGEEKKKEKEKEE

SEQ ID NO: 1351 - protein, 26 aa, Artificial Sequence
  Synthetic Peptide
KATTAPATTRNTGRGGEEKKKEKEKE

SEQ ID NO: 1352 - protein, 26 aa, Artificial Sequence
  Synthetic Peptide
AKATTAPATTRNTGRGGEEKKKEKEK

SEQ ID NO: 1353 - protein, 26 aa, Artificial Sequence
  Synthetic Peptide
LAKATTAPATTRNTGRGGEEKKKEKE

SEQ ID NO: 1354 - protein, 26 aa, Artificial Sequence
  Synthetic Peptide
SLAKATTAPATTRNTGRGGEEKKKEK

SEQ ID NO: 1355 - protein, 26 aa, Artificial Sequence
  Synthetic Peptide
GSLAKATTAPATTRNTGRGGEEKKKE

SEQ ID NO: 1356 - protein, 26 aa, Artificial Sequence
  Synthetic Peptide
EGSLAKATTAPATTRNTGRGGEEKKK

SEQ ID NO: 1357 - protein, 26 aa, Artificial Sequence
  Synthetic Peptide
AEGSLAKATTAPATTRNTGRGGEEKK

SEQ ID NO: 1358 - protein, 26 aa, Artificial Sequence
  Synthetic Peptide
QAEGSLAKATTAPATTRNTGRGGEEK

SEQ ID NO: 1359 - protein, 26 aa, Artificial Sequence
  Synthetic Peptide
PQAEGSLAKATTAPATTRNTGRGGEE

SEQ ID NO: 1360 - protein, 26 aa, Artificial Sequence
  Synthetic Peptide
QPQAEGSLAKATTAPATTRNTGRGGE

SEQ ID NO: 1361 - protein, 26 aa, Artificial Sequence
  Synthetic Peptide
AQPQAEGSLAKATTAPATTRNTGRGG

SEQ ID NO: 1362 - protein, 26 aa, Artificial Sequence
  Synthetic Peptide
TAQPQAEGSLAKATTAPATTRNTGRG

SEQ ID NO: 1363 - protein, 26 aa, Artificial Sequence
  Synthetic Peptide
PTAQPQAEGSLAKATTAPATTRNTGR

SEQ ID NO: 1364 - protein, 26 aa, Artificial Sequence
  Synthetic Peptide
VPTAQPQAEGSLAKATTAPATTRNTG

SEQ ID NO: 1365 - protein, 26 aa, Artificial Sequence
  Synthetic Peptide
SVPTAQPQAEGSLAKATTAPATTRNT

SEQ ID NO: 1366 - protein, 26 aa, Artificial Sequence
  Synthetic Peptide
SSVPTAQPQAEGSLAKATTAPATTRN

SEQ ID NO: 1367 - protein, 26 aa, Artificial Sequence
  Synthetic Peptide
ASSVPTAQPQAEGSLAKATTAPATTR

SEQ ID NO: 1368 - protein, 26 aa, Artificial Sequence
  Synthetic Peptide
QASSVPTAQPQAEGSLAKATTAPATT

SEQ ID NO: 1369 - protein, 26 aa, Artificial Sequence
  Synthetic Peptide
AQASSVPTAQPQAEGSLAKATTAPAT

SEQ ID NO: 1370 - protein, 26 aa, Artificial Sequence
  Synthetic Peptide
KAQASSVPTAQPQAEGSLAKATTAPA

SEQ ID NO: 1371 - protein, 26 aa, Artificial Sequence
  Synthetic Peptide
PKAQASSVPTAQPQAEGSLAKATTAP

SEQ ID NO: 1372 - protein, 26 aa, Artificial Sequence
  Synthetic Peptide
SPKAQASSVPTAQPQAEGSLAKATTA

SEQ ID NO: 1373 - protein, 26 aa, Artificial Sequence
  Synthetic Peptide
ESPKAQASSVPTAQPQAEGSLAKATT

SEQ ID NO: 1374 - protein, 26 aa, Artificial Sequence
  Synthetic Peptide
PESPKAQASSVPTAQPQAEGSLAKAT

SEQ ID NO: 1375 - protein, 26 aa, Artificial Sequence
  Synthetic Peptide
WPESPKAQASSVPTAQPQAEGSLAKA

SEQ ID NO: 1376 - protein, 26 aa, Artificial Sequence
  Synthetic Peptide
RWPESPKAQASSVPTAQPQAEGSLAK

SEQ ID NO: 1377 - protein, 25 aa, Artificial Sequence
  Synthetic Peptide
QEERETKTPECPSHTQPLGVYLLTP

SEQ ID NO: 1378 - protein, 25 aa, Artificial Sequence
  Synthetic Peptide
EQEERETKTPECPSHTQPLGVYLLT

SEQ ID NO: 1379 - protein, 25 aa, Artificial Sequence
  Synthetic Peptide
EEQEERETKTPECPSHTQPLGVYLL

SEQ ID NO: 1380 - protein, 25 aa, Artificial Sequence
  Synthetic Peptide
KEEQEERETKTPECPSHTQPLGVYL

SEQ ID NO: 1381 - protein, 25 aa, Artificial Sequence
  Synthetic Peptide
EKEEQEERETKTPECPSHTQPLGVY

SEQ ID NO: 1382 - protein, 25 aa, Artificial Sequence
  Synthetic Peptide
KEKEEQEERETKTPECPSHTQPLGV

SEQ ID NO: 1383 - protein, 25 aa, Artificial Sequence
  Synthetic Peptide
EKEKEEQEERETKTPECPSHTQPLG

SEQ ID NO: 1384 - protein, 25 aa, Artificial Sequence
  Synthetic Peptide
KEKEKEEQEERETKTPECPSHTQPL

SEQ ID NO: 1385 - protein, 25 aa, Artificial Sequence
  Synthetic Peptide
KKEKEKEEQEERETKTPECPSHTQP

SEQ ID NO: 1386 - protein, 25 aa, Artificial Sequence
  Synthetic Peptide
KKKEKEKEEQEERETKTPECPSHTQ

SEQ ID NO: 1387 - protein, 25 aa, Artificial Sequence
  Synthetic Peptide
EKKKEKEKEEQEERETKTPECPSHT

SEQ ID NO: 1388 - protein, 25 aa, Artificial Sequence
  Synthetic Peptide
EEKKKEKEKEEQEERETKTPECPSH

SEQ ID NO: 1389 - protein, 25 aa, Artificial Sequence
  Synthetic Peptide
GEEKKKEKEKEEQEERETKTPECPS

SEQ ID NO: 1390 - protein, 25 aa, Artificial Sequence
  Synthetic Peptide
GGEEKKKEKEKEEQEERETKTPECP

SEQ ID NO: 1391 - protein, 25 aa, Artificial Sequence
  Synthetic Peptide
RGGEEKKKEKEKEEQEERETKTPEC

SEQ ID NO: 1392 - protein, 25 aa, Artificial Sequence
  Synthetic Peptide
GRGGEEKKKEKEKEEQEERETKTPE

SEQ ID NO: 1393 - protein, 25 aa, Artificial Sequence
  Synthetic Peptide
TGRGGEEKKKEKEKEEQEERETKTP

SEQ ID NO: 1394 - protein, 25 aa, Artificial Sequence
  Synthetic Peptide
NTGRGGEEKKKEKEKEEQEERETKT

SEQ ID NO: 1395 - protein, 25 aa, Artificial Sequence
  Synthetic Peptide
RNTGRGGEEKKKEKEKEEQEERETK

SEQ ID NO: 1396 - protein, 25 aa, Artificial Sequence
  Synthetic Peptide
TRNTGRGGEEKKKEKEKEEQEERET

SEQ ID NO: 1397 - protein, 25 aa, Artificial Sequence
  Synthetic Peptide
TTRNTGRGGEEKKKEKEKEEQEERE

SEQ ID NO: 1398 - protein, 25 aa, Artificial Sequence
  Synthetic Peptide
ATTRNTGRGGEEKKKEKEKEEQEER

SEQ ID NO: 1399 - protein, 25 aa, Artificial Sequence
  Synthetic Peptide
PATTRNTGRGGEEKKKEKEKEEQEE

SEQ ID NO: 1400 - protein, 25 aa, Artificial Sequence
  Synthetic Peptide
APATTRNTGRGGEEKKKEKEKEEQE

SEQ ID NO: 1401 - protein, 25 aa, Artificial Sequence
  Synthetic Peptide
TAPATTRNTGRGGEEKKKEKEKEEQ

SEQ ID NO: 1402 - protein, 25 aa, Artificial Sequence
  Synthetic Peptide
TTAPATTRNTGRGGEEKKKEKEKEE

SEQ ID NO: 1403 - protein, 25 aa, Artificial Sequence
  Synthetic Peptide
ATTAPATTRNTGRGGEEKKKEKEKE

SEQ ID NO: 1404 - protein, 25 aa, Artificial Sequence
  Synthetic Peptide
KATTAPATTRNTGRGGEEKKKEKEK

SEQ ID NO: 1405 - protein, 25 aa, Artificial Sequence
  Synthetic Peptide
AKATTAPATTRNTGRGGEEKKKEKE

SEQ ID NO: 1406 - protein, 25 aa, Artificial Sequence
  Synthetic Peptide
LAKATTAPATTRNTGRGGEEKKKEK

SEQ ID NO: 1407 - protein, 25 aa, Artificial Sequence
  Synthetic Peptide
SLAKATTAPATTRNTGRGGEEKKKE

SEQ ID NO: 1408 - protein, 25 aa, Artificial Sequence
  Synthetic Peptide
GSLAKATTAPATTRNTGRGGEEKKK

SEQ ID NO: 1409 - protein, 25 aa, Artificial Sequence
  Synthetic Peptide
EGSLAKATTAPATTRNTGRGGEEKK

SEQ ID NO: 1410 - protein, 25 aa, Artificial Sequence
  Synthetic Peptide
AEGSLAKATTAPATTRNTGRGGEEK

SEQ ID NO: 1411 - protein, 25 aa, Artificial Sequence
  Synthetic Peptide
QAEGSLAKATTAPATTRNTGRGGEE

SEQ ID NO: 1412 - protein, 25 aa, Artificial Sequence
  Synthetic Peptide
PQAEGSLAKATTAPATTRNTGRGGE

SEQ ID NO: 1413 - protein, 25 aa, Artificial Sequence
  Synthetic Peptide
QPQAEGSLAKATTAPATTRNTGRGG

SEQ ID NO: 1414 - protein, 25 aa, Artificial Sequence
  Synthetic Peptide
AQPQAEGSLAKATTAPATTRNTGRG

SEQ ID NO: 1415 - protein, 25 aa, Artificial Sequence
  Synthetic Peptide
TAQPQAEGSLAKATTAPATTRNTGR

SEQ ID NO: 1416 - protein, 25 aa, Artificial Sequence
  Synthetic Peptide
PTAQPQAEGSLAKATTAPATTRNTG

SEQ ID NO: 1417 - protein, 25 aa, Artificial Sequence
  Synthetic Peptide
VPTAQPQAEGSLAKATTAPATTRNT

SEQ ID NO: 1418 - protein, 25 aa, Artificial Sequence
  Synthetic Peptide
SVPTAQPQAEGSLAKATTAPATTRN

SEQ ID NO: 1419 - protein, 25 aa, Artificial Sequence
  Synthetic Peptide
SSVPTAQPQAEGSLAKATTAPATTR

SEQ ID NO: 1420 - protein, 25 aa, Artificial Sequence
  Synthetic Peptide
ASSVPTAQPQAEGSLAKATTAPATT

SEQ ID NO: 1421 - protein, 25 aa, Artificial Sequence
  Synthetic Peptide
QASSVPTAQPQAEGSLAKATTAPAT

SEQ ID NO: 1422 - protein, 25 aa, Artificial Sequence
  Synthetic Peptide
AQASSVPTAQPQAEGSLAKATTAPA

SEQ ID NO: 1423 - protein, 25 aa, Artificial Sequence
  Synthetic Peptide
KAQASSVPTAQPQAEGSLAKATTAP

SEQ ID NO: 1424 - protein, 25 aa, Artificial Sequence
  Synthetic Peptide
PKAQASSVPTAQPQAEGSLAKATTA

SEQ ID NO: 1425 - protein, 25 aa, Artificial Sequence
  Synthetic Peptide
SPKAQASSVPTAQPQAEGSLAKATT

SEQ ID NO: 1426 - protein, 25 aa, Artificial Sequence
  Synthetic Peptide
ESPKAQASSVPTAQPQAEGSLAKAT

SEQ ID NO: 1427 - protein, 25 aa, Artificial Sequence
  Synthetic Peptide
PESPKAQASSVPTAQPQAEGSLAKA

SEQ ID NO: 1428 - protein, 25 aa, Artificial Sequence
  Synthetic Peptide
WPESPKAQASSVPTAQPQAEGSLAK

SEQ ID NO: 1429 - protein, 25 aa, Artificial Sequence
  Synthetic Peptide
RWPESPKAQASSVPTAQPQAEGSLA

SEQ ID NO: 1430 - protein, 24 aa, Artificial Sequence
  Synthetic Peptide
EERETKTPECPSHTQPLGVYLLTP

SEQ ID NO: 1431 - protein, 24 aa, Artificial Sequence
  Synthetic Peptide
QEERETKTPECPSHTQPLGVYLLT

SEQ ID NO: 1432 - protein, 24 aa, Artificial Sequence
  Synthetic Peptide
EQEERETKTPECPSHTQPLGVYLL

SEQ ID NO: 1433 - protein, 24 aa, Artificial Sequence
  Synthetic Peptide
EEQEERETKTPECPSHTQPLGVYL

SEQ ID NO: 1434 - protein, 24 aa, Artificial Sequence
  Synthetic Peptide
KEEQEERETKTPECPSHTQPLGVY

SEQ ID NO: 1435 - protein, 24 aa, Artificial Sequence
  Synthetic Peptide
EKEEQEERETKTPECPSHTQPLGV

SEQ ID NO: 1436 - protein, 24 aa, Artificial Sequence
  Synthetic Peptide
KEKEEQEERETKTPECPSHTQPLG

SEQ ID NO: 1437 - protein, 24 aa, Artificial Sequence
  Synthetic Peptide
EKEKEEQEERETKTPECPSHTQPL

SEQ ID NO: 1438 - protein, 24 aa, Artificial Sequence
  Synthetic Peptide
KEKEKEEQEERETKTPECPSHTQP

SEQ ID NO: 1439 - protein, 24 aa, Artificial Sequence
  Synthetic Peptide
KKEKEKEEQEERETKTPECPSHTQ

SEQ ID NO: 1440 - protein, 24 aa, Artificial Sequence
  Synthetic Peptide
KKKEKEKEEQEERETKTPECPSHT

SEQ ID NO: 1441 - protein, 24 aa, Artificial Sequence
  Synthetic Peptide
EKKKEKEKEEQEERETKTPECPSH

SEQ ID NO: 1442 - protein, 24 aa, Artificial Sequence
  Synthetic Peptide
EEKKKEKEKEEQEERETKTPECPS

SEQ ID NO: 1443 - protein, 24 aa, Artificial Sequence
  Synthetic Peptide
GEEKKKEKEKEEQEERETKTPECP

SEQ ID NO: 1444 - protein, 24 aa, Artificial Sequence
  Synthetic Peptide
GGEEKKKEKEKEEQEERETKTPEC

SEQ ID NO: 1445 - protein, 24 aa, Artificial Sequence
  Synthetic Peptide
RGGEEKKKEKEKEEQEERETKTPE

SEQ ID NO: 1446 - protein, 24 aa, Artificial Sequence
  Synthetic Peptide
GRGGEEKKKEKEKEEQEERETKTP

SEQ ID NO: 1447 - protein, 24 aa, Artificial Sequence
  Synthetic Peptide
TGRGGEEKKKEKEKEEQEERETKT

SEQ ID NO: 1448 - protein, 24 aa, Artificial Sequence
  Synthetic Peptide
NTGRGGEEKKKEKEKEEQEERETK

SEQ ID NO: 1449 - protein, 24 aa, Artificial Sequence
  Synthetic Peptide
RNTGRGGEEKKKEKEKEEQEERET

SEQ ID NO: 1450 - protein, 24 aa, Artificial Sequence
  Synthetic Peptide
TRNTGRGGEEKKKEKEKEEQEERE

SEQ ID NO: 1451 - protein, 24 aa, Artificial Sequence
  Synthetic Peptide
TTRNTGRGGEEKKKEKEKEEQEER

SEQ ID NO: 1452 - protein, 24 aa, Artificial Sequence
  Synthetic Peptide
ATTRNTGRGGEEKKKEKEKEEQEE

SEQ ID NO: 1453 - protein, 24 aa, Artificial Sequence
  Synthetic Peptide
PATTRNTGRGGEEKKKEKEKEEQE

SEQ ID NO: 1454 - protein, 24 aa, Artificial Sequence
  Synthetic Peptide
APATTRNTGRGGEEKKKEKEKEEQ

SEQ ID NO: 1455 - protein, 24 aa, Artificial Sequence
  Synthetic Peptide
TAPATTRNTGRGGEEKKKEKEKEE

SEQ ID NO: 1456 - protein, 24 aa, Artificial Sequence
  Synthetic Peptide
TTAPATTRNTGRGGEEKKKEKEKE

SEQ ID NO: 1457 - protein, 24 aa, Artificial Sequence
  Synthetic Peptide
ATTAPATTRNTGRGGEEKKKEKEK

SEQ ID NO: 1458 - protein, 24 aa, Artificial Sequence
  Synthetic Peptide
KATTAPATTRNTGRGGEEKKKEKE

SEQ ID NO: 1459 - protein, 24 aa, Artificial Sequence
  Synthetic Peptide
AKATTAPATTRNTGRGGEEKKKEK

SEQ ID NO: 1460 - protein, 24 aa, Artificial Sequence
  Synthetic Peptide
LAKATTAPATTRNTGRGGEEKKKE

SEQ ID NO: 1461 - protein, 24 aa, Artificial Sequence
  Synthetic Peptide
SLAKATTAPATTRNTGRGGEEKKK

SEQ ID NO: 1462 - protein, 24 aa, Artificial Sequence
  Synthetic Peptide
GSLAKATTAPATTRNTGRGGEEKK

SEQ ID NO: 1463 - protein, 24 aa, Artificial Sequence
  Synthetic Peptide
EGSLAKATTAPATTRNTGRGGEEK

SEQ ID NO: 1464 - protein, 24 aa, Artificial Sequence
  Synthetic Peptide
AEGSLAKATTAPATTRNTGRGGEE

SEQ ID NO: 1465 - protein, 24 aa, Artificial Sequence
  Synthetic Peptide
QAEGSLAKATTAPATTRNTGRGGE

SEQ ID NO: 1466 - protein, 24 aa, Artificial Sequence
  Synthetic Peptide
PQAEGSLAKATTAPATTRNTGRGG

SEQ ID NO: 1467 - protein, 24 aa, Artificial Sequence
  Synthetic Peptide
QPQAEGSLAKATTAPATTRNTGRG

SEQ ID NO: 1468 - protein, 24 aa, Artificial Sequence
  Synthetic Peptide
AQPQAEGSLAKATTAPATTRNTGR

SEQ ID NO: 1469 - protein, 24 aa, Artificial Sequence
  Synthetic Peptide
TAQPQAEGSLAKATTAPATTRNTG

SEQ ID NO: 1470 - protein, 24 aa, Artificial Sequence
  Synthetic Peptide
PTAQPQAEGSLAKATTAPATTRNT

SEQ ID NO: 1471 - protein, 24 aa, Artificial Sequence
  Synthetic Peptide
VPTAQPQAEGSLAKATTAPATTRN

SEQ ID NO: 1472 - protein, 24 aa, Artificial Sequence
  Synthetic Peptide
SVPTAQPQAEGSLAKATTAPATTR

SEQ ID NO: 1473 - protein, 24 aa, Artificial Sequence
  Synthetic Peptide
SSVPTAQPQAEGSLAKATTAPATT

SEQ ID NO: 1474 - protein, 24 aa, Artificial Sequence
  Synthetic Peptide
ASSVPTAQPQAEGSLAKATTAPAT

SEQ ID NO: 1475 - protein, 24 aa, Artificial Sequence
  Synthetic Peptide
QASSVPTAQPQAEGSLAKATTAPA

SEQ ID NO: 1476 - protein, 24 aa, Artificial Sequence
  Synthetic Peptide
AQASSVPTAQPQAEGSLAKATTAP

SEQ ID NO: 1477 - protein, 24 aa, Artificial Sequence
  Synthetic Peptide
KAQASSVPTAQPQAEGSLAKATTA

SEQ ID NO: 1478 - protein, 24 aa, Artificial Sequence
  Synthetic Peptide
PKAQASSVPTAQPQAEGSLAKATT

SEQ ID NO: 1479 - protein, 24 aa, Artificial Sequence
  Synthetic Peptide
SPKAQASSVPTAQPQAEGSLAKAT

SEQ ID NO: 1480 - protein, 24 aa, Artificial Sequence
  Synthetic Peptide
ESPKAQASSVPTAQPQAEGSLAKA

SEQ ID NO: 1481 - protein, 24 aa, Artificial Sequence
  Synthetic Peptide
PESPKAQASSVPTAQPQAEGSLAK

SEQ ID NO: 1482 - protein, 24 aa, Artificial Sequence
  Synthetic Peptide
WPESPKAQASSVPTAQPQAEGSLA

SEQ ID NO: 1483 - protein, 24 aa, Artificial Sequence
  Synthetic Peptide
RWPESPKAQASSVPTAQPQAEGSL

SEQ ID NO: 1484 - protein, 23 aa, Artificial Sequence
  Synthetic Peptide
ERETKTPECPSHTQPLGVYLLTP

SEQ ID NO: 1485 - protein, 23 aa, Artificial Sequence
  Synthetic Peptide
EERETKTPECPSHTQPLGVYLLT

SEQ ID NO: 1486 - protein, 23 aa, Artificial Sequence
  Synthetic Peptide
QEERETKTPECPSHTQPLGVYLL

SEQ ID NO: 1487 - protein, 23 aa, Artificial Sequence
  Synthetic Peptide
EQEERETKTPECPSHTQPLGVYL

SEQ ID NO: 1488 - protein, 23 aa, Artificial Sequence
  Synthetic Peptide
EEQEERETKTPECPSHTQPLGVY

SEQ ID NO: 1489 - protein, 23 aa, Artificial Sequence
  Synthetic Peptide
KEEQEERETKTPECPSHTQPLGV

SEQ ID NO: 1490 - protein, 23 aa, Artificial Sequence
  Synthetic Peptide
EKEEQEERETKTPECPSHTQPLG

SEQ ID NO: 1491 - protein, 23 aa, Artificial Sequence
  Synthetic Peptide
KEKEEQEERETKTPECPSHTQPL

SEQ ID NO: 1492 - protein, 23 aa, Artificial Sequence
  Synthetic Peptide
EKEKEEQEERETKTPECPSHTQP

SEQ ID NO: 1493 - protein, 23 aa, Artificial Sequence
  Synthetic Peptide
KEKEKEEQEERETKTPECPSHTQ

SEQ ID NO: 1494 - protein, 23 aa, Artificial Sequence
  Synthetic Peptide
KKEKEKEEQEERETKTPECPSHT

SEQ ID NO: 1495 - protein, 23 aa, Artificial Sequence
  Synthetic Peptide
KKKEKEKEEQEERETKTPECPSH

SEQ ID NO: 1496 - protein, 23 aa, Artificial Sequence
  Synthetic Peptide
EKKKEKEKEEQEERETKTPECPS

SEQ ID NO: 1497 - protein, 23 aa, Artificial Sequence
  Synthetic Peptide
EEKKKEKEKEEQEERETKTPECP

SEQ ID NO: 1498 - protein, 23 aa, Artificial Sequence
  Synthetic Peptide
GEEKKKEKEKEEQEERETKTPEC

SEQ ID NO: 1499 - protein, 23 aa, Artificial Sequence
  Synthetic Peptide
GGEEKKKEKEKEEQEERETKTPE

SEQ ID NO: 1500 - protein, 23 aa, Artificial Sequence
  Synthetic Peptide
RGGEEKKKEKEKEEQEERETKTP

SEQ ID NO: 1501 - protein, 23 aa, Artificial Sequence
  Synthetic Peptide
GRGGEEKKKEKEKEEQEERETKT

SEQ ID NO: 1502 - protein, 23 aa, Artificial Sequence
  Synthetic Peptide
TGRGGEEKKKEKEKEEQEERETK

SEQ ID NO: 1503 - protein, 23 aa, Artificial Sequence
  Synthetic Peptide
NTGRGGEEKKKEKEKEEQEERET

SEQ ID NO: 1504 - protein, 23 aa, Artificial Sequence
  Synthetic Peptide
RNTGRGGEEKKKEKEKEEQEERE

SEQ ID NO: 1505 - protein, 23 aa, Artificial Sequence
  Synthetic Peptide
TRNTGRGGEEKKKEKEKEEQEER

SEQ ID NO: 1506 - protein, 23 aa, Artificial Sequence
  Synthetic Peptide
TTRNTGRGGEEKKKEKEKEEQEE

SEQ ID NO: 1507 - protein, 23 aa, Artificial Sequence
  Synthetic Peptide
ATTRNTGRGGEEKKKEKEKEEQE

SEQ ID NO: 1508 - protein, 23 aa, Artificial Sequence
  Synthetic Peptide
PATTRNTGRGGEEKKKEKEKEEQ

SEQ ID NO: 1509 - protein, 23 aa, Artificial Sequence
  Synthetic Peptide
APATTRNTGRGGEEKKKEKEKEE

SEQ ID NO: 1510 - protein, 23 aa, Artificial Sequence
  Synthetic Peptide
TAPATTRNTGRGGEEKKKEKEKE

SEQ ID NO: 1511 - protein, 23 aa, Artificial Sequence
  Synthetic Peptide
TTAPATTRNTGRGGEEKKKEKEK

SEQ ID NO: 1512 - protein, 23 aa, Artificial Sequence
  Synthetic Peptide
ATTAPATTRNTGRGGEEKKKEKE

SEQ ID NO: 1513 - protein, 23 aa, Artificial Sequence
  Synthetic Peptide
KATTAPATTRNTGRGGEEKKKEK

SEQ ID NO: 1514 - protein, 23 aa, Artificial Sequence
  Synthetic Peptide
AKATTAPATTRNTGRGGEEKKKE

SEQ ID NO: 1515 - protein, 23 aa, Artificial Sequence
  Synthetic Peptide
LAKATTAPATTRNTGRGGEEKKK

SEQ ID NO: 1516 - protein, 23 aa, Artificial Sequence
  Synthetic Peptide
SLAKATTAPATTRNTGRGGEEKK

SEQ ID NO: 1517 - protein, 23 aa, Artificial Sequence
  Synthetic Peptide
GSLAKATTAPATTRNTGRGGEEK

SEQ ID NO: 1518 - protein, 23 aa, Artificial Sequence
  Synthetic Peptide
EGSLAKATTAPATTRNTGRGGEE

SEQ ID NO: 1519 - protein, 23 aa, Artificial Sequence
  Synthetic Peptide
AEGSLAKATTAPATTRNTGRGGE

SEQ ID NO: 1520 - protein, 23 aa, Artificial Sequence
  Synthetic Peptide
QAEGSLAKATTAPATTRNTGRGG

SEQ ID NO: 1521 - protein, 23 aa, Artificial Sequence
  Synthetic Peptide
PQAEGSLAKATTAPATTRNTGRG

SEQ ID NO: 1522 - protein, 23 aa, Artificial Sequence
  Synthetic Peptide
QPQAEGSLAKATTAPATTRNTGR

SEQ ID NO: 1523 - protein, 23 aa, Artificial Sequence
  Synthetic Peptide
AQPQAEGSLAKATTAPATTRNTG

SEQ ID NO: 1524 - protein, 23 aa, Artificial Sequence
  Synthetic Peptide
TAQPQAEGSLAKATTAPATTRNT

SEQ ID NO: 1525 - protein, 23 aa, Artificial Sequence
  Synthetic Peptide
PTAQPQAEGSLAKATTAPATTRN

SEQ ID NO: 1526 - protein, 23 aa, Artificial Sequence
  Synthetic Peptide
VPTAQPQAEGSLAKATTAPATTR

SEQ ID NO: 1527 - protein, 23 aa, Artificial Sequence
  Synthetic Peptide
SVPTAQPQAEGSLAKATTAPATT

SEQ ID NO: 1528 - protein, 23 aa, Artificial Sequence
  Synthetic Peptide
SSVPTAQPQAEGSLAKATTAPAT

SEQ ID NO: 1529 - protein, 23 aa, Artificial Sequence
  Synthetic Peptide
ASSVPTAQPQAEGSLAKATTAPA

SEQ ID NO: 1530 - protein, 23 aa, Artificial Sequence
  Synthetic Peptide
QASSVPTAQPQAEGSLAKATTAP

SEQ ID NO: 1531 - protein, 23 aa, Artificial Sequence
  Synthetic Peptide
AQASSVPTAQPQAEGSLAKATTA

SEQ ID NO: 1532 - protein, 23 aa, Artificial Sequence
  Synthetic Peptide
KAQASSVPTAQPQAEGSLAKATT

SEQ ID NO: 1533 - protein, 23 aa, Artificial Sequence
  Synthetic Peptide
PKAQASSVPTAQPQAEGSLAKAT

SEQ ID NO: 1534 - protein, 23 aa, Artificial Sequence
  Synthetic Peptide
SPKAQASSVPTAQPQAEGSLAKA

SEQ ID NO: 1535 - protein, 23 aa, Artificial Sequence
  Synthetic Peptide
ESPKAQASSVPTAQPQAEGSLAK

SEQ ID NO: 1536 - protein, 23 aa, Artificial Sequence
  Synthetic Peptide
PESPKAQASSVPTAQPQAEGSLA

SEQ ID NO: 1537 - protein, 23 aa, Artificial Sequence
  Synthetic Peptide
WPESPKAQASSVPTAQPQAEGSL

SEQ ID NO: 1538 - protein, 23 aa, Artificial Sequence
  Synthetic Peptide
RWPESPKAQASSVPTAQPQAEGS

SEQ ID NO: 1539 - protein, 22 aa, Artificial Sequence
  Synthetic Peptide
RETKTPECPSHTQPLGVYLLTP

SEQ ID NO: 1540 - protein, 22 aa, Artificial Sequence
  Synthetic Peptide
ERETKTPECPSHTQPLGVYLLT

SEQ ID NO: 1541 - protein, 22 aa, Artificial Sequence
  Synthetic Peptide
EERETKTPECPSHTQPLGVYLL

SEQ ID NO: 1542 - protein, 22 aa, Artificial Sequence
  Synthetic Peptide
QEERETKTPECPSHTQPLGVYL

SEQ ID NO: 1543 - protein, 22 aa, Artificial Sequence
  Synthetic Peptide
EQEERETKTPECPSHTQPLGVY

SEQ ID NO: 1544 - protein, 22 aa, Artificial Sequence
  Synthetic Peptide
EEQEERETKTPECPSHTQPLGV

SEQ ID NO: 1545 - protein, 22 aa, Artificial Sequence
  Synthetic Peptide
KEEQEERETKTPECPSHTQPLG

SEQ ID NO: 1546 - protein, 22 aa, Artificial Sequence
  Synthetic Peptide
EKEEQEERETKTPECPSHTQPL

SEQ ID NO: 1547 - protein, 22 aa, Artificial Sequence
  Synthetic Peptide
KEKEEQEERETKTPECPSHTQP

SEQ ID NO: 1548 - protein, 22 aa, Artificial Sequence
  Synthetic Peptide
EKEKEEQEERETKTPECPSHTQ

SEQ ID NO: 1549 - protein, 22 aa, Artificial Sequence
  Synthetic Peptide
KEKEKEEQEERETKTPECPSHT

SEQ ID NO: 1550 - protein, 22 aa, Artificial Sequence
  Synthetic Peptide
KKEKEKEEQEERETKTPECPSH

SEQ ID NO: 1551 - protein, 22 aa, Artificial Sequence
  Synthetic Peptide
KKKEKEKEEQEERETKTPECPS

SEQ ID NO: 1552 - protein, 22 aa, Artificial Sequence
  Synthetic Peptide
EKKKEKEKEEQEERETKTPECP

SEQ ID NO: 1553 - protein, 22 aa, Artificial Sequence
  Synthetic Peptide
EEKKKEKEKEEQEERETKTPEC

SEQ ID NO: 1554 - protein, 22 aa, Artificial Sequence
  Synthetic Peptide
GEEKKKEKEKEEQEERETKTPE

SEQ ID NO: 1555 - protein, 22 aa, Artificial Sequence
  Synthetic Peptide
GGEEKKKEKEKEEQEERETKTP

SEQ ID NO: 1556 - protein, 22 aa, Artificial Sequence
  Synthetic Peptide
RGGEEKKKEKEKEEQEERETKT

SEQ ID NO: 1557 - protein, 22 aa, Artificial Sequence
  Synthetic Peptide
GRGGEEKKKEKEKEEQEERETK

SEQ ID NO: 1558 - protein, 22 aa, Artificial Sequence
  Synthetic Peptide
TGRGGEEKKKEKEKEEQEERET

SEQ ID NO: 1559 - protein, 22 aa, Artificial Sequence
  Synthetic Peptide
NTGRGGEEKKKEKEKEEQEERE

SEQ ID NO: 1560 - protein, 22 aa, Artificial Sequence
  Synthetic Peptide
RNTGRGGEEKKKEKEKEEQEER

SEQ ID NO: 1561 - protein, 22 aa, Artificial Sequence
  Synthetic Peptide
TRNTGRGGEEKKKEKEKEEQEE

SEQ ID NO: 1562 - protein, 22 aa, Artificial Sequence
  Synthetic Peptide
TTRNTGRGGEEKKKEKEKEEQE

SEQ ID NO: 1563 - protein, 22 aa, Artificial Sequence
  Synthetic Peptide
ATTRNTGRGGEEKKKEKEKEEQ

SEQ ID NO: 1564 - protein, 22 aa, Artificial Sequence
  Synthetic Peptide
PATTRNTGRGGEEKKKEKEKEE

SEQ ID NO: 1565 - protein, 22 aa, Artificial Sequence
  Synthetic Peptide
APATTRNTGRGGEEKKKEKEKE

SEQ ID NO: 1566 - protein, 22 aa, Artificial Sequence
  Synthetic Peptide
TAPATTRNTGRGGEEKKKEKEK

SEQ ID NO: 1567 - protein, 22 aa, Artificial Sequence
  Synthetic Peptide
TTAPATTRNTGRGGEEKKKEKE

SEQ ID NO: 1568 - protein, 22 aa, Artificial Sequence
  Synthetic Peptide
ATTAPATTRNTGRGGEEKKKEK

SEQ ID NO: 1569 - protein, 22 aa, Artificial Sequence
  Synthetic Peptide
KATTAPATTRNTGRGGEEKKKE

SEQ ID NO: 1570 - protein, 22 aa, Artificial Sequence
  Synthetic Peptide
AKATTAPATTRNTGRGGEEKKK

SEQ ID NO: 1571 - protein, 22 aa, Artificial Sequence
  Synthetic Peptide
LAKATTAPATTRNTGRGGEEKK

SEQ ID NO: 1572 - protein, 22 aa, Artificial Sequence
  Synthetic Peptide
SLAKATTAPATTRNTGRGGEEK

SEQ ID NO: 1573 - protein, 22 aa, Artificial Sequence
  Synthetic Peptide
GSLAKATTAPATTRNTGRGGEE

SEQ ID NO: 1574 - protein, 22 aa, Artificial Sequence
  Synthetic Peptide
EGSLAKATTAPATTRNTGRGGE

SEQ ID NO: 1575 - protein, 22 aa, Artificial Sequence
  Synthetic Peptide
AEGSLAKATTAPATTRNTGRGG

SEQ ID NO: 1576 - protein, 22 aa, Artificial Sequence
  Synthetic Peptide
QAEGSLAKATTAPATTRNTGRG

SEQ ID NO: 1577 - protein, 22 aa, Artificial Sequence
  Synthetic Peptide
PQAEGSLAKATTAPATTRNTGR

SEQ ID NO: 1578 - protein, 22 aa, Artificial Sequence
  Synthetic Peptide
QPQAEGSLAKATTAPATTRNTG

SEQ ID NO: 1579 - protein, 22 aa, Artificial Sequence
  Synthetic Peptide
AQPQAEGSLAKATTAPATTRNT

SEQ ID NO: 1580 - protein, 22 aa, Artificial Sequence
  Synthetic Peptide
TAQPQAEGSLAKATTAPATTRN

SEQ ID NO: 1581 - protein, 22 aa, Artificial Sequence
  Synthetic Peptide
PTAQPQAEGSLAKATTAPATTR

SEQ ID NO: 1582 - protein, 22 aa, Artificial Sequence
  Synthetic Peptide
VPTAQPQAEGSLAKATTAPATT

SEQ ID NO: 1583 - protein, 22 aa, Artificial Sequence
  Synthetic Peptide
SVPTAQPQAEGSLAKATTAPAT

SEQ ID NO: 1584 - protein, 22 aa, Artificial Sequence
  Synthetic Peptide
SSVPTAQPQAEGSLAKATTAPA

SEQ ID NO: 1585 - protein, 22 aa, Artificial Sequence
  Synthetic Peptide
ASSVPTAQPQAEGSLAKATTAP

SEQ ID NO: 1586 - protein, 22 aa, Artificial Sequence
  Synthetic Peptide
QASSVPTAQPQAEGSLAKATTA

SEQ ID NO: 1587 - protein, 22 aa, Artificial Sequence
  Synthetic Peptide
AQASSVPTAQPQAEGSLAKATT

SEQ ID NO: 1588 - protein, 22 aa, Artificial Sequence
  Synthetic Peptide
KAQASSVPTAQPQAEGSLAKAT

SEQ ID NO: 1589 - protein, 22 aa, Artificial Sequence
  Synthetic Peptide
PKAQASSVPTAQPQAEGSLAKA

SEQ ID NO: 1590 - protein, 22 aa, Artificial Sequence
  Synthetic Peptide
SPKAQASSVPTAQPQAEGSLAK

SEQ ID NO: 1591 - protein, 22 aa, Artificial Sequence
  Synthetic Peptide
ESPKAQASSVPTAQPQAEGSLA

SEQ ID NO: 1592 - protein, 22 aa, Artificial Sequence
  Synthetic Peptide
PESPKAQASSVPTAQPQAEGSL

SEQ ID NO: 1593 - protein, 22 aa, Artificial Sequence
  Synthetic Peptide
WPESPKAQASSVPTAQPQAEGS

SEQ ID NO: 1594 - protein, 22 aa, Artificial Sequence
  Synthetic Peptide
RWPESPKAQASSVPTAQPQAEG

SEQ ID NO: 1595 - protein, 21 aa, Artificial Sequence
  Synthetic Peptide
ETKTPECPSHTQPLGVYLLTP

SEQ ID NO: 1596 - protein, 21 aa, Artificial Sequence
  Synthetic Peptide
RETKTPECPSHTQPLGVYLLT

SEQ ID NO: 1597 - protein, 21 aa, Artificial Sequence
  Synthetic Peptide
ERETKTPECPSHTQPLGVYLL

SEQ ID NO: 1598 - protein, 21 aa, Artificial Sequence
  Synthetic Peptide
EERETKTPECPSHTQPLGVYL

SEQ ID NO: 1599 - protein, 21 aa, Artificial Sequence
  Synthetic Peptide
QEERETKTPECPSHTQPLGVY

SEQ ID NO: 1600 - protein, 21 aa, Artificial Sequence
  Synthetic Peptide
EQEERETKTPECPSHTQPLGV

SEQ ID NO: 1601 - protein, 21 aa, Artificial Sequence
  Synthetic Peptide
EEQEERETKTPECPSHTQPLG

SEQ ID NO: 1602 - protein, 21 aa, Artificial Sequence
  Synthetic Peptide
KEEQEERETKTPECPSHTQPL

SEQ ID NO: 1603 - protein, 21 aa, Artificial Sequence
  Synthetic Peptide
EKEEQEERETKTPECPSHTQP

SEQ ID NO: 1604 - protein, 21 aa, Artificial Sequence
  Synthetic Peptide
KEKEEQEERETKTPECPSHTQ

SEQ ID NO: 1605 - protein, 21 aa, Artificial Sequence
  Synthetic Peptide
EKEKEEQEERETKTPECPSHT

SEQ ID NO: 1606 - protein, 21 aa, Artificial Sequence
  Synthetic Peptide
KEKEKEEQEERETKTPECPSH

SEQ ID NO: 1607 - protein, 21 aa, Artificial Sequence
  Synthetic Peptide
KKEKEKEEQEERETKTPECPS

SEQ ID NO: 1608 - protein, 21 aa, Artificial Sequence
  Synthetic Peptide
KKKEKEKEEQEERETKTPECP

SEQ ID NO: 1609 - protein, 21 aa, Artificial Sequence
  Synthetic Peptide
EKKKEKEKEEQEERETKTPEC

SEQ ID NO: 1610 - protein, 21 aa, Artificial Sequence
  Synthetic Peptide
EEKKKEKEKEEQEERETKTPE

SEQ ID NO: 1611 - protein, 21 aa, Artificial Sequence
  Synthetic Peptide
GEEKKKEKEKEEQEERETKTP

SEQ ID NO: 1612 - protein, 21 aa, Artificial Sequence
  Synthetic Peptide
GGEEKKKEKEKEEQEERETKT

SEQ ID NO: 1613 - protein, 21 aa, Artificial Sequence
  Synthetic Peptide
RGGEEKKKEKEKEEQEERETK

SEQ ID NO: 1614 - protein, 21 aa, Artificial Sequence
  Synthetic Peptide
GRGGEEKKKEKEKEEQEERET

SEQ ID NO: 1615 - protein, 21 aa, Artificial Sequence
  Synthetic Peptide
TGRGGEEKKKEKEKEEQEERE

SEQ ID NO: 1616 - protein, 21 aa, Artificial Sequence
  Synthetic Peptide
NTGRGGEEKKKEKEKEEQEER

SEQ ID NO: 1617 - protein, 21 aa, Artificial Sequence
  Synthetic Peptide
RNTGRGGEEKKKEKEKEEQEE

SEQ ID NO: 1618 - protein, 21 aa, Artificial Sequence
  Synthetic Peptide
TRNTGRGGEEKKKEKEKEEQE

SEQ ID NO: 1619 - protein, 21 aa, Artificial Sequence
  Synthetic Peptide
TTRNTGRGGEEKKKEKEKEEQ

SEQ ID NO: 1620 - protein, 21 aa, Artificial Sequence
  Synthetic Peptide
ATTRNTGRGGEEKKKEKEKEE

SEQ ID NO: 1621 - protein, 21 aa, Artificial Sequence
  Synthetic Peptide
PATTRNTGRGGEEKKKEKEKE

SEQ ID NO: 1622 - protein, 21 aa, Artificial Sequence
  Synthetic Peptide
APATTRNTGRGGEEKKKEKEK

SEQ ID NO: 1623 - protein, 21 aa, Artificial Sequence
  Synthetic Peptide
TAPATTRNTGRGGEEKKKEKE

SEQ ID NO: 1624 - protein, 21 aa, Artificial Sequence
  Synthetic Peptide
TTAPATTRNTGRGGEEKKKEK

SEQ ID NO: 1625 - protein, 21 aa, Artificial Sequence
  Synthetic Peptide
ATTAPATTRNTGRGGEEKKKE

SEQ ID NO: 1626 - protein, 21 aa, Artificial Sequence
  Synthetic Peptide
KATTAPATTRNTGRGGEEKKK

SEQ ID NO: 1627 - protein, 21 aa, Artificial Sequence
  Synthetic Peptide
AKATTAPATTRNTGRGGEEKK

SEQ ID NO: 1628 - protein, 21 aa, Artificial Sequence
  Synthetic Peptide
LAKATTAPATTRNTGRGGEEK

SEQ ID NO: 1629 - protein, 21 aa, Artificial Sequence
  Synthetic Peptide
SLAKATTAPATTRNTGRGGEE

SEQ ID NO: 1630 - protein, 21 aa, Artificial Sequence
  Synthetic Peptide
GSLAKATTAPATTRNTGRGGE

SEQ ID NO: 1631 - protein, 21 aa, Artificial Sequence
  Synthetic Peptide
EGSLAKATTAPATTRNTGRGG

SEQ ID NO: 1632 - protein, 21 aa, Artificial Sequence
  Synthetic Peptide
AEGSLAKATTAPATTRNTGRG

SEQ ID NO: 1633 - protein, 21 aa, Artificial Sequence
  Synthetic Peptide
QAEGSLAKATTAPATTRNTGR

SEQ ID NO: 1634 - protein, 21 aa, Artificial Sequence
  Synthetic Peptide
PQAEGSLAKATTAPATTRNTG

SEQ ID NO: 1635 - protein, 21 aa, Artificial Sequence
  Synthetic Peptide
QPQAEGSLAKATTAPATTRNT

SEQ ID NO: 1636 - protein, 21 aa, Artificial Sequence
  Synthetic Peptide
AQPQAEGSLAKATTAPATTRN

SEQ ID NO: 1637 - protein, 21 aa, Artificial Sequence
  Synthetic Peptide
TAQPQAEGSLAKATTAPATTR

SEQ ID NO: 1638 - protein, 21 aa, Artificial Sequence
  Synthetic Peptide
PTAQPQAEGSLAKATTAPATT

SEQ ID NO: 1639 - protein, 21 aa, Artificial Sequence
  Synthetic Peptide
VPTAQPQAEGSLAKATTAPAT

SEQ ID NO: 1640 - protein, 21 aa, Artificial Sequence
  Synthetic Peptide
SVPTAQPQAEGSLAKATTAPA

SEQ ID NO: 1641 - protein, 21 aa, Artificial Sequence
  Synthetic Peptide
SSVPTAQPQAEGSLAKATTAP

SEQ ID NO: 1642 - protein, 21 aa, Artificial Sequence
  Synthetic Peptide
ASSVPTAQPQAEGSLAKATTA

SEQ ID NO: 1643 - protein, 21 aa, Artificial Sequence
  Synthetic Peptide
QASSVPTAQPQAEGSLAKATT

SEQ ID NO: 1644 - protein, 21 aa, Artificial Sequence
  Synthetic Peptide
AQASSVPTAQPQAEGSLAKAT

SEQ ID NO: 1645 - protein, 21 aa, Artificial Sequence
  Synthetic Peptide
KAQASSVPTAQPQAEGSLAKA

SEQ ID NO: 1646 - protein, 21 aa, Artificial Sequence
  Synthetic Peptide
PKAQASSVPTAQPQAEGSLAK

SEQ ID NO: 1647 - protein, 21 aa, Artificial Sequence
  Synthetic Peptide
SPKAQASSVPTAQPQAEGSLA

SEQ ID NO: 1648 - protein, 21 aa, Artificial Sequence
  Synthetic Peptide
ESPKAQASSVPTAQPQAEGSL

SEQ ID NO: 1649 - protein, 21 aa, Artificial Sequence
  Synthetic Peptide
PESPKAQASSVPTAQPQAEGS

SEQ ID NO: 1650 - protein, 21 aa, Artificial Sequence
  Synthetic Peptide
WPESPKAQASSVPTAQPQAEG

SEQ ID NO: 1651 - protein, 21 aa, Artificial Sequence
  Synthetic Peptide
RWPESPKAQASSVPTAQPQAE

SEQ ID NO: 1652 - protein, 20 aa, Artificial Sequence
  Synthetic Peptide
RWPESPKAQASSVPTAQPQA

SEQ ID NO: 1653 - protein, 20 aa, Artificial Sequence
  Synthetic Peptide
WPESPKAQASSVPTAQPQAE

SEQ ID NO: 1654 - protein, 20 aa, Artificial Sequence
  Synthetic Peptide
PESPKAQASSVPTAQPQAEG

SEQ ID NO: 1655 - protein, 20 aa, Artificial Sequence
  Synthetic Peptide
ESPKAQASSVPTAQPQAEGS

SEQ ID NO: 1656 - protein, 20 aa, Artificial Sequence
  Synthetic Peptide
SPKAQASSVPTAQPQAEGSL

SEQ ID NO: 1657 - protein, 20 aa, Artificial Sequence
  Synthetic Peptide
PKAQASSVPTAQPQAEGSLA

SEQ ID NO: 1658 - protein, 20 aa, Artificial Sequence
  Synthetic Peptide
KAQASSVPTAQPQAEGSLAK

SEQ ID NO: 1659 - protein, 20 aa, Artificial Sequence
  Synthetic Peptide
AQASSVPTAQPQAEGSLAKA

SEQ ID NO: 1660 - protein, 20 aa, Artificial Sequence
  Synthetic Peptide
QASSVPTAQPQAEGSLAKAT

SEQ ID NO: 1661 - protein, 20 aa, Artificial Sequence
  Synthetic Peptide
ASSVPTAQPQAEGSLAKATT

SEQ ID NO: 1662 - protein, 20 aa, Artificial Sequence
  Synthetic Peptide
SSVPTAQPQAEGSLAKATTA

SEQ ID NO: 1663 - protein, 20 aa, Artificial Sequence
  Synthetic Peptide
SVPTAQPQAEGSLAKATTAP

SEQ ID NO: 1664 - protein, 20 aa, Artificial Sequence
  Synthetic Peptide
VPTAQPQAEGSLAKATTAPA

SEQ ID NO: 1665 - protein, 20 aa, Artificial Sequence
  Synthetic Peptide
PTAQPQAEGSLAKATTAPAT

SEQ ID NO: 1666 - protein, 20 aa, Artificial Sequence
  Synthetic Peptide
TAQPQAEGSLAKATTAPATT

SEQ ID NO: 1667 - protein, 20 aa, Artificial Sequence
  Synthetic Peptide
AQPQAEGSLAKATTAPATTR

SEQ ID NO: 1668 - protein, 20 aa, Artificial Sequence
  Synthetic Peptide
QPQAEGSLAKATTAPATTRN

SEQ ID NO: 1669 - protein, 20 aa, Artificial Sequence
  Synthetic Peptide
PQAEGSLAKATTAPATTRNT

SEQ ID NO: 1670 - protein, 20 aa, Artificial Sequence
  Synthetic Peptide
QAEGSLAKATTAPATTRNTG

SEQ ID NO: 1671 - protein, 20 aa, Artificial Sequence
  Synthetic Peptide
AEGSLAKATTAPATTRNTGR

SEQ ID NO: 1672 - protein, 20 aa, Artificial Sequence
  Synthetic Peptide
EGSLAKATTAPATTRNTGRG

SEQ ID NO: 1673 - protein, 20 aa, Artificial Sequence
  Synthetic Peptide
GSLAKATTAPATTRNTGRGG

SEQ ID NO: 1674 - protein, 20 aa, Artificial Sequence
  Synthetic Peptide
SLAKATTAPATTRNTGRGGE

SEQ ID NO: 1675 - protein, 20 aa, Artificial Sequence
  Synthetic Peptide
LAKATTAPATTRNTGRGGEE

SEQ ID NO: 1676 - protein, 20 aa, Artificial Sequence
  Synthetic Peptide
AKATTAPATTRNTGRGGEEK

SEQ ID NO: 1677 - protein, 20 aa, Artificial Sequence
  Synthetic Peptide
KATTAPATTRNTGRGGEEKK

SEQ ID NO: 1678 - protein, 20 aa, Artificial Sequence
  Synthetic Peptide
ATTAPATTRNTGRGGEEKKK

SEQ ID NO: 1679 - protein, 20 aa, Artificial Sequence
  Synthetic Peptide
TTAPATTRNTGRGGEEKKKE

SEQ ID NO: 1680 - protein, 20 aa, Artificial Sequence
  Synthetic Peptide
TAPATTRNTGRGGEEKKKEK

SEQ ID NO: 1681 - protein, 20 aa, Artificial Sequence
  Synthetic Peptide
APATTRNTGRGGEEKKKEKE

SEQ ID NO: 1682 - protein, 20 aa, Artificial Sequence
  Synthetic Peptide
PATTRNTGRGGEEKKKEKEK

SEQ ID NO: 1683 - protein, 20 aa, Artificial Sequence
  Synthetic Peptide
ATTRNTGRGGEEKKKEKEKE

SEQ ID NO: 1684 - protein, 20 aa, Artificial Sequence
  Synthetic Peptide
TTRNTGRGGEEKKKEKEKEE

SEQ ID NO: 1685 - protein, 20 aa, Artificial Sequence
  Synthetic Peptide
TRNTGRGGEEKKKEKEKEEQ

SEQ ID NO: 1686 - protein, 20 aa, Artificial Sequence
  Synthetic Peptide
RNTGRGGEEKKKEKEKEEQE

SEQ ID NO: 1687 - protein, 20 aa, Artificial Sequence
  Synthetic Peptide
NTGRGGEEKKKEKEKEEQEE

SEQ ID NO: 1688 - protein, 20 aa, Artificial Sequence
  Synthetic Peptide
TGRGGEEKKKEKEKEEQEER

SEQ ID NO: 1689 - protein, 20 aa, Artificial Sequence
  Synthetic Peptide
GRGGEEKKKEKEKEEQEERE

SEQ ID NO: 1690 - protein, 20 aa, Artificial Sequence
  Synthetic Peptide
RGGEEKKKEKEKEEQEERET

SEQ ID NO: 1691 - protein, 20 aa, Artificial Sequence
  Synthetic Peptide
GGEEKKKEKEKEEQEERETK

SEQ ID NO: 1692 - protein, 20 aa, Artificial Sequence
  Synthetic Peptide
GEEKKKEKEKEEQEERETKT

SEQ ID NO: 1693 - protein, 20 aa, Artificial Sequence
  Synthetic Peptide
EEKKKEKEKEEQEERETKTP

SEQ ID NO: 1694 - protein, 20 aa, Artificial Sequence
  Synthetic Peptide
EKKKEKEKEEQEERETKTPE

SEQ ID NO: 1695 - protein, 20 aa, Artificial Sequence
  Synthetic Peptide
KKKEKEKEEQEERETKTPEC

SEQ ID NO: 1696 - protein, 20 aa, Artificial Sequence
  Synthetic Peptide
KKEKEKEEQEERETKTPECP

SEQ ID NO: 1697 - protein, 20 aa, Artificial Sequence
  Synthetic Peptide
KEKEKEEQEERETKTPECPS

SEQ ID NO: 1698 - protein, 20 aa, Artificial Sequence
  Synthetic Peptide
EKEKEEQEERETKTPECPSH

SEQ ID NO: 1699 - protein, 20 aa, Artificial Sequence
  Synthetic Peptide
KEKEEQEERETKTPECPSHT

SEQ ID NO: 1700 - protein, 20 aa, Artificial Sequence
  Synthetic Peptide
EKEEQEERETKTPECPSHTQ

SEQ ID NO: 1701 - protein, 20 aa, Artificial Sequence
  Synthetic Peptide
KEEQEERETKTPECPSHTQP

SEQ ID NO: 1702 - protein, 20 aa, Artificial Sequence
  Synthetic Peptide
EEQEERETKTPECPSHTQPL

SEQ ID NO: 1703 - protein, 20 aa, Artificial Sequence
  Synthetic Peptide
EQEERETKTPECPSHTQPLG

SEQ ID NO: 1704 - protein, 20 aa, Artificial Sequence
  Synthetic Peptide
QEERETKTPECPSHTQPLGV

SEQ ID NO: 1705 - protein, 20 aa, Artificial Sequence
  Synthetic Peptide
EERETKTPECPSHTQPLGVY

SEQ ID NO: 1706 - protein, 20 aa, Artificial Sequence
  Synthetic Peptide
ERETKTPECPSHTQPLGVYL

SEQ ID NO: 1707 - protein, 20 aa, Artificial Sequence
  Synthetic Peptide
RETKTPECPSHTQPLGVYLL

SEQ ID NO: 1708 - protein, 20 aa, Artificial Sequence
  Synthetic Peptide
ETKTPECPSHTQPLGVYLLT

SEQ ID NO: 1709 - protein, 20 aa, Artificial Sequence
  Synthetic Peptide
TKTPECPSHTQPLGVYLLTP

SEQ ID NO: 1710 - protein, 19 aa, Artificial Sequence
  Synthetic Peptide
RWPESPKAQASSVPTAQPQ

SEQ ID NO: 1711 - protein, 19 aa, Artificial Sequence
  Synthetic Peptide
WPESPKAQASSVPTAQPQA

SEQ ID NO: 1712 - protein, 19 aa, Artificial Sequence
  Synthetic Peptide
PESPKAQASSVPTAQPQAE

SEQ ID NO: 1713 - protein, 19 aa, Artificial Sequence
  Synthetic Peptide
ESPKAQASSVPTAQPQAEG

SEQ ID NO: 1714 - protein, 19 aa, Artificial Sequence
  Synthetic Peptide
SPKAQASSVPTAQPQAEGS

SEQ ID NO: 1715 - protein, 19 aa, Artificial Sequence
  Synthetic Peptide
PKAQASSVPTAQPQAEGSL

SEQ ID NO: 1716 - protein, 19 aa, Artificial Sequence
  Synthetic Peptide
KAQASSVPTAQPQAEGSLA

SEQ ID NO: 1717 - protein, 19 aa, Artificial Sequence
  Synthetic Peptide
AQASSVPTAQPQAEGSLAK

SEQ ID NO: 1718 - protein, 19 aa, Artificial Sequence
  Synthetic Peptide
QASSVPTAQPQAEGSLAKA

SEQ ID NO: 1719 - protein, 19 aa, Artificial Sequence
  Synthetic Peptide
ASSVPTAQPQAEGSLAKAT

SEQ ID NO: 1720 - protein, 19 aa, Artificial Sequence
  Synthetic Peptide
SSVPTAQPQAEGSLAKATT

SEQ ID NO: 1721 - protein, 19 aa, Artificial Sequence
  Synthetic Peptide
SVPTAQPQAEGSLAKATTA

SEQ ID NO: 1722 - protein, 19 aa, Artificial Sequence
  Synthetic Peptide
VPTAQPQAEGSLAKATTAP

SEQ ID NO: 1723 - protein, 19 aa, Artificial Sequence
  Synthetic Peptide
PTAQPQAEGSLAKATTAPA

SEQ ID NO: 1724 - protein, 19 aa, Artificial Sequence
  Synthetic Peptide
TAQPQAEGSLAKATTAPAT

SEQ ID NO: 1725 - protein, 19 aa, Artificial Sequence
  Synthetic Peptide
AQPQAEGSLAKATTAPATT

SEQ ID NO: 1726 - protein, 19 aa, Artificial Sequence
  Synthetic Peptide
QPQAEGSLAKATTAPATTR

SEQ ID NO: 1727 - protein, 19 aa, Artificial Sequence
  Synthetic Peptide
PQAEGSLAKATTAPATTRN

SEQ ID NO: 1728 - protein, 19 aa, Artificial Sequence
  Synthetic Peptide
QAEGSLAKATTAPATTRNT

SEQ ID NO: 1729 - protein, 19 aa, Artificial Sequence
  Synthetic Peptide
AEGSLAKATTAPATTRNTG

SEQ ID NO: 1730 - protein, 19 aa, Artificial Sequence
  Synthetic Peptide
EGSLAKATTAPATTRNTGR

SEQ ID NO: 1731 - protein, 19 aa, Artificial Sequence
  Synthetic Peptide
GSLAKATTAPATTRNTGRG

SEQ ID NO: 1732 - protein, 19 aa, Artificial Sequence
  Synthetic Peptide
SLAKATTAPATTRNTGRGG

SEQ ID NO: 1733 - protein, 19 aa, Artificial Sequence
  Synthetic Peptide
LAKATTAPATTRNTGRGGE

SEQ ID NO: 1734 - protein, 19 aa, Artificial Sequence
  Synthetic Peptide
AKATTAPATTRNTGRGGEE

SEQ ID NO: 1735 - protein, 19 aa, Artificial Sequence
  Synthetic Peptide
KATTAPATTRNTGRGGEEK

SEQ ID NO: 1736 - protein, 19 aa, Artificial Sequence
  Synthetic Peptide
ATTAPATTRNTGRGGEEKK

SEQ ID NO: 1737 - protein, 19 aa, Artificial Sequence
  Synthetic Peptide
TTAPATTRNTGRGGEEKKK

SEQ ID NO: 1738 - protein, 19 aa, Artificial Sequence
  Synthetic Peptide
TAPATTRNTGRGGEEKKKE

SEQ ID NO: 1739 - protein, 19 aa, Artificial Sequence
  Synthetic Peptide
APATTRNTGRGGEEKKKEK

SEQ ID NO: 1740 - protein, 19 aa, Artificial Sequence
  Synthetic Peptide
PATTRNTGRGGEEKKKEKE

SEQ ID NO: 1741 - protein, 19 aa, Artificial Sequence
  Synthetic Peptide
ATTRNTGRGGEEKKKEKEK

SEQ ID NO: 1742 - protein, 19 aa, Artificial Sequence
  Synthetic Peptide
TTRNTGRGGEEKKKEKEKE

SEQ ID NO: 1743 - protein, 19 aa, Artificial Sequence
  Synthetic Peptide
TRNTGRGGEEKKKEKEKEE

SEQ ID NO: 1744 - protein, 19 aa, Artificial Sequence
  Synthetic Peptide
RNTGRGGEEKKKEKEKEEQ

SEQ ID NO: 1745 - protein, 19 aa, Artificial Sequence
  Synthetic Peptide
NTGRGGEEKKKEKEKEEQE

SEQ ID NO: 1746 - protein, 19 aa, Artificial Sequence
  Synthetic Peptide
TGRGGEEKKKEKEKEEQEE

SEQ ID NO: 1747 - protein, 19 aa, Artificial Sequence
  Synthetic Peptide
GRGGEEKKKEKEKEEQEER

SEQ ID NO: 1748 - protein, 19 aa, Artificial Sequence
  Synthetic Peptide
RGGEEKKKEKEKEEQEERE

SEQ ID NO: 1749 - protein, 19 aa, Artificial Sequence
  Synthetic Peptide
GGEEKKKEKEKEEQEERET

SEQ ID NO: 1750 - protein, 19 aa, Artificial Sequence
  Synthetic Peptide
GEEKKKEKEKEEQEERETK

SEQ ID NO: 1751 - protein, 19 aa, Artificial Sequence
  Synthetic Peptide
EEKKKEKEKEEQEERETKT

SEQ ID NO: 1752 - protein, 19 aa, Artificial Sequence
  Synthetic Peptide
EKKKEKEKEEQEERETKTP

SEQ ID NO: 1753 - protein, 19 aa, Artificial Sequence
  Synthetic Peptide
KKKEKEKEEQEERETKTPE

SEQ ID NO: 1754 - protein, 19 aa, Artificial Sequence
  Synthetic Peptide
KKEKEKEEQEERETKTPEC

SEQ ID NO: 1755 - protein, 19 aa, Artificial Sequence
  Synthetic Peptide
KEKEKEEQEERETKTPECP

SEQ ID NO: 1756 - protein, 19 aa, Artificial Sequence
  Synthetic Peptide
EKEKEEQEERETKTPECPS

SEQ ID NO: 1757 - protein, 19 aa, Artificial Sequence
  Synthetic Peptide
KEKEEQEERETKTPECPSH

SEQ ID NO: 1758 - protein, 19 aa, Artificial Sequence
  Synthetic Peptide
EKEEQEERETKTPECPSHT

SEQ ID NO: 1759 - protein, 19 aa, Artificial Sequence
  Synthetic Peptide
KEEQEERETKTPECPSHTQ

SEQ ID NO: 1760 - protein, 19 aa, Artificial Sequence
  Synthetic Peptide
EEQEERETKTPECPSHTQP

SEQ ID NO: 1761 - protein, 19 aa, Artificial Sequence
  Synthetic Peptide
EQEERETKTPECPSHTQPL

SEQ ID NO: 1762 - protein, 19 aa, Artificial Sequence
  Synthetic Peptide
QEERETKTPECPSHTQPLG

SEQ ID NO: 1763 - protein, 19 aa, Artificial Sequence
  Synthetic Peptide
EERETKTPECPSHTQPLGV

SEQ ID NO: 1764 - protein, 19 aa, Artificial Sequence
  Synthetic Peptide
ERETKTPECPSHTQPLGVY

SEQ ID NO: 1765 - protein, 19 aa, Artificial Sequence
  Synthetic Peptide
RETKTPECPSHTQPLGVYL

SEQ ID NO: 1766 - protein, 19 aa, Artificial Sequence
  Synthetic Peptide
ETKTPECPSHTQPLGVYLL

SEQ ID NO: 1767 - protein, 19 aa, Artificial Sequence
  Synthetic Peptide
TKTPECPSHTQPLGVYLLT

SEQ ID NO: 1768 - protein, 19 aa, Artificial Sequence
  Synthetic Peptide
KTPECPSHTQPLGVYLLTP

SEQ ID NO: 1769 - protein, 18 aa, Artificial Sequence
  Synthetic Peptide
RWPESPKAQASSVPTAQP

SEQ ID NO: 1770 - protein, 18 aa, Artificial Sequence
  Synthetic Peptide
WPESPKAQASSVPTAQPQ

SEQ ID NO: 1771 - protein, 18 aa, Artificial Sequence
  Synthetic Peptide
PESPKAQASSVPTAQPQA

SEQ ID NO: 1772 - protein, 18 aa, Artificial Sequence
  Synthetic Peptide
ESPKAQASSVPTAQPQAE

SEQ ID NO: 1773 - protein, 18 aa, Artificial Sequence
  Synthetic Peptide
SPKAQASSVPTAQPQAEG

SEQ ID NO: 1774 - protein, 18 aa, Artificial Sequence
  Synthetic Peptide
PKAQASSVPTAQPQAEGS

SEQ ID NO: 1775 - protein, 18 aa, Artificial Sequence
  Synthetic Peptide
KAQASSVPTAQPQAEGSL

SEQ ID NO: 1776 - protein, 18 aa, Artificial Sequence
  Synthetic Peptide
AQASSVPTAQPQAEGSLA

SEQ ID NO: 1777 - protein, 18 aa, Artificial Sequence
  Synthetic Peptide
QASSVPTAQPQAEGSLAK

SEQ ID NO: 1778 - protein, 18 aa, Artificial Sequence
  Synthetic Peptide
ASSVPTAQPQAEGSLAKA

SEQ ID NO: 1779 - protein, 18 aa, Artificial Sequence
  Synthetic Peptide
SSVPTAQPQAEGSLAKAT

SEQ ID NO: 1780 - protein, 18 aa, Artificial Sequence
  Synthetic Peptide
SVPTAQPQAEGSLAKATT

SEQ ID NO: 1781 - protein, 18 aa, Artificial Sequence
  Synthetic Peptide
VPTAQPQAEGSLAKATTA

SEQ ID NO: 1782 - protein, 18 aa, Artificial Sequence
  Synthetic Peptide
PTAQPQAEGSLAKATTAP

SEQ ID NO: 1783 - protein, 18 aa, Artificial Sequence
  Synthetic Peptide
TAQPQAEGSLAKATTAPA

SEQ ID NO: 1784 - protein, 18 aa, Artificial Sequence
  Synthetic Peptide
AQPQAEGSLAKATTAPAT

SEQ ID NO: 1785 - protein, 18 aa, Artificial Sequence
  Synthetic Peptide
QPQAEGSLAKATTAPATT

SEQ ID NO: 1786 - protein, 18 aa, Artificial Sequence
  Synthetic Peptide
PQAEGSLAKATTAPATTR

SEQ ID NO: 1787 - protein, 18 aa, Artificial Sequence
  Synthetic Peptide
QAEGSLAKATTAPATTRN

SEQ ID NO: 1788 - protein, 18 aa, Artificial Sequence
  Synthetic Peptide
AEGSLAKATTAPATTRNT

SEQ ID NO: 1789 - protein, 18 aa, Artificial Sequence
  Synthetic Peptide
EGSLAKATTAPATTRNTG

SEQ ID NO: 1790 - protein, 18 aa, Artificial Sequence
  Synthetic Peptide
GSLAKATTAPATTRNTGR

SEQ ID NO: 1791 - protein, 18 aa, Artificial Sequence
  Synthetic Peptide
SLAKATTAPATTRNTGRG

SEQ ID NO: 1792 - protein, 18 aa, Artificial Sequence
  Synthetic Peptide
LAKATTAPATTRNTGRGG

SEQ ID NO: 1793 - protein, 18 aa, Artificial Sequence
  Synthetic Peptide
AKATTAPATTRNTGRGGE

SEQ ID NO: 1794 - protein, 18 aa, Artificial Sequence
  Synthetic Peptide
KATTAPATTRNTGRGGEE

SEQ ID NO: 1795 - protein, 18 aa, Artificial Sequence
  Synthetic Peptide
ATTAPATTRNTGRGGEEK

SEQ ID NO: 1796 - protein, 18 aa, Artificial Sequence
  Synthetic Peptide
TTAPATTRNTGRGGEEKK

SEQ ID NO: 1797 - protein, 18 aa, Artificial Sequence
  Synthetic Peptide
TAPATTRNTGRGGEEKKK

SEQ ID NO: 1798 - protein, 18 aa, Artificial Sequence
  Synthetic Peptide
APATTRNTGRGGEEKKKE

SEQ ID NO: 1799 - protein, 18 aa, Artificial Sequence
  Synthetic Peptide
PATTRNTGRGGEEKKKEK

SEQ ID NO: 1800 - protein, 18 aa, Artificial Sequence
  Synthetic Peptide
ATTRNTGRGGEEKKKEKE

SEQ ID NO: 1801 - protein, 18 aa, Artificial Sequence
  Synthetic Peptide
TTRNTGRGGEEKKKEKEK

SEQ ID NO: 1802 - protein, 18 aa, Artificial Sequence
  Synthetic Peptide
TRNTGRGGEEKKKEKEKE

SEQ ID NO: 1803 - protein, 18 aa, Artificial Sequence
  Synthetic Peptide
RNTGRGGEEKKKEKEKEE

SEQ ID NO: 1804 - protein, 18 aa, Artificial Sequence
  Synthetic Peptide
NTGRGGEEKKKEKEKEEQ

SEQ ID NO: 1805 - protein, 18 aa, Artificial Sequence
  Synthetic Peptide
TGRGGEEKKKEKEKEEQE

SEQ ID NO: 1806 - protein, 18 aa, Artificial Sequence
  Synthetic Peptide
GRGGEEKKKEKEKEEQEE

SEQ ID NO: 1807 - protein, 18 aa, Artificial Sequence
  Synthetic Peptide
RGGEEKKKEKEKEEQEER

SEQ ID NO: 1808 - protein, 18 aa, Artificial Sequence
  Synthetic Peptide
GGEEKKKEKEKEEQEERE

SEQ ID NO: 1809 - protein, 18 aa, Artificial Sequence
  Synthetic Peptide
GEEKKKEKEKEEQEERET

SEQ ID NO: 1810 - protein, 18 aa, Artificial Sequence
  Synthetic Peptide
EEKKKEKEKEEQEERETK

SEQ ID NO: 1811 - protein, 18 aa, Artificial Sequence
  Synthetic Peptide
EKKKEKEKEEQEERETKT

SEQ ID NO: 1812 - protein, 18 aa, Artificial Sequence
  Synthetic Peptide
KKKEKEKEEQEERETKTP

SEQ ID NO: 1813 - protein, 18 aa, Artificial Sequence
  Synthetic Peptide
KKEKEKEEQEERETKTPE

SEQ ID NO: 1814 - protein, 18 aa, Artificial Sequence
  Synthetic Peptide
KEKEKEEQEERETKTPEC

SEQ ID NO: 1815 - protein, 18 aa, Artificial Sequence
  Synthetic Peptide
EKEKEEQEERETKTPECP

SEQ ID NO: 1816 - protein, 18 aa, Artificial Sequence
  Synthetic Peptide
KEKEEQEERETKTPECPS

SEQ ID NO: 1817 - protein, 18 aa, Artificial Sequence
  Synthetic Peptide
EKEEQEERETKTPECPSH

SEQ ID NO: 1818 - protein, 18 aa, Artificial Sequence
  Synthetic Peptide
KEEQEERETKTPECPSHT

SEQ ID NO: 1819 - protein, 18 aa, Artificial Sequence
  Synthetic Peptide
EEQEERETKTPECPSHTQ

SEQ ID NO: 1820 - protein, 18 aa, Artificial Sequence
  Synthetic Peptide
EQEERETKTPECPSHTQP

SEQ ID NO: 1821 - protein, 18 aa, Artificial Sequence
  Synthetic Peptide
QEERETKTPECPSHTQPL

SEQ ID NO: 1822 - protein, 18 aa, Artificial Sequence
  Synthetic Peptide
EERETKTPECPSHTQPLG

SEQ ID NO: 1823 - protein, 18 aa, Artificial Sequence
  Synthetic Peptide
ERETKTPECPSHTQPLGV

SEQ ID NO: 1824 - protein, 18 aa, Artificial Sequence
  Synthetic Peptide
RETKTPECPSHTQPLGVY

SEQ ID NO: 1825 - protein, 18 aa, Artificial Sequence
  Synthetic Peptide
ETKTPECPSHTQPLGVYL

SEQ ID NO: 1826 - protein, 18 aa, Artificial Sequence
  Synthetic Peptide
TKTPECPSHTQPLGVYLL

SEQ ID NO: 1827 - protein, 18 aa, Artificial Sequence
  Synthetic Peptide
KTPECPSHTQPLGVYLLT

SEQ ID NO: 1828 - protein, 18 aa, Artificial Sequence
  Synthetic Peptide
TPECPSHTQPLGVYLLTP

SEQ ID NO: 1829 - protein, 17 aa, Artificial Sequence
  Synthetic Peptide
RWPESPKAQASSVPTAQ

SEQ ID NO: 1830 - protein, 17 aa, Artificial Sequence
  Synthetic Peptide
WPESPKAQASSVPTAQP

SEQ ID NO: 1831 - protein, 17 aa, Artificial Sequence
  Synthetic Peptide
PESPKAQASSVPTAQPQ

SEQ ID NO: 1832 - protein, 17 aa, Artificial Sequence
  Synthetic Peptide
ESPKAQASSVPTAQPQA

SEQ ID NO: 1833 - protein, 17 aa, Artificial Sequence
  Synthetic Peptide
SPKAQASSVPTAQPQAE

SEQ ID NO: 1834 - protein, 17 aa, Artificial Sequence
  Synthetic Peptide
PKAQASSVPTAQPQAEG

SEQ ID NO: 1835 - protein, 17 aa, Artificial Sequence
  Synthetic Peptide
KAQASSVPTAQPQAEGS

SEQ ID NO: 1836 - protein, 17 aa, Artificial Sequence
  Synthetic Peptide
AQASSVPTAQPQAEGSL

SEQ ID NO: 1837 - protein, 17 aa, Artificial Sequence
  Synthetic Peptide
QASSVPTAQPQAEGSLA

SEQ ID NO: 1838 - protein, 17 aa, Artificial Sequence
  Synthetic Peptide
ASSVPTAQPQAEGSLAK

SEQ ID NO: 1839 - protein, 17 aa, Artificial Sequence
  Synthetic Peptide
SSVPTAQPQAEGSLAKA

SEQ ID NO: 1840 - protein, 17 aa, Artificial Sequence
  Synthetic Peptide
SVPTAQPQAEGSLAKAT

SEQ ID NO: 1841 - protein, 17 aa, Artificial Sequence
  Synthetic Peptide
VPTAQPQAEGSLAKATT

SEQ ID NO: 1842 - protein, 17 aa, Artificial Sequence
  Synthetic Peptide
PTAQPQAEGSLAKATTA

SEQ ID NO: 1843 - protein, 17 aa, Artificial Sequence
  Synthetic Peptide
TAQPQAEGSLAKATTAP

SEQ ID NO: 1844 - protein, 17 aa, Artificial Sequence
  Synthetic Peptide
AQPQAEGSLAKATTAPA

SEQ ID NO: 1845 - protein, 17 aa, Artificial Sequence
  Synthetic Peptide
QPQAEGSLAKATTAPAT

SEQ ID NO: 1846 - protein, 17 aa, Artificial Sequence
  Synthetic Peptide
PQAEGSLAKATTAPATT

SEQ ID NO: 1847 - protein, 17 aa, Artificial Sequence
  Synthetic Peptide
QAEGSLAKATTAPATTR

SEQ ID NO: 1848 - protein, 17 aa, Artificial Sequence
  Synthetic Peptide
AEGSLAKATTAPATTRN

SEQ ID NO: 1849 - protein, 17 aa, Artificial Sequence
  Synthetic Peptide
EGSLAKATTAPATTRNT

SEQ ID NO: 1850 - protein, 17 aa, Artificial Sequence
  Synthetic Peptide
GSLAKATTAPATTRNTG

SEQ ID NO: 1851 - protein, 17 aa, Artificial Sequence
  Synthetic Peptide
SLAKATTAPATTRNTGR

SEQ ID NO: 1852 - protein, 17 aa, Artificial Sequence
  Synthetic Peptide
LAKATTAPATTRNTGRG

SEQ ID NO: 1853 - protein, 17 aa, Artificial Sequence
  Synthetic Peptide
AKATTAPATTRNTGRGG

SEQ ID NO: 1854 - protein, 17 aa, Artificial Sequence
  Synthetic Peptide
KATTAPATTRNTGRGGE

SEQ ID NO: 1855 - protein, 17 aa, Artificial Sequence
  Synthetic Peptide
ATTAPATTRNTGRGGEE

SEQ ID NO: 1856 - protein, 17 aa, Artificial Sequence
  Synthetic Peptide
TTAPATTRNTGRGGEEK

SEQ ID NO: 1857 - protein, 17 aa, Artificial Sequence
  Synthetic Peptide
TAPATTRNTGRGGEEKK

SEQ ID NO: 1858 - protein, 17 aa, Artificial Sequence
  Synthetic Peptide
APATTRNTGRGGEEKKK

SEQ ID NO: 1859 - protein, 17 aa, Artificial Sequence
  Synthetic Peptide
PATTRNTGRGGEEKKKE

SEQ ID NO: 1860 - protein, 17 aa, Artificial Sequence
  Synthetic Peptide
ATTRNTGRGGEEKKKEK

SEQ ID NO: 1861 - protein, 17 aa, Artificial Sequence
  Synthetic Peptide
TTRNTGRGGEEKKKEKE

SEQ ID NO: 1862 - protein, 17 aa, Artificial Sequence
  Synthetic Peptide
TRNTGRGGEEKKKEKEK

SEQ ID NO: 1863 - protein, 17 aa, Artificial Sequence
  Synthetic Peptide
RNTGRGGEEKKKEKEKE

SEQ ID NO: 1864 - protein, 17 aa, Artificial Sequence
  Synthetic Peptide
NTGRGGEEKKKEKEKEE

SEQ ID NO: 1865 - protein, 17 aa, Artificial Sequence
  Synthetic Peptide
TGRGGEEKKKEKEKEEQ

SEQ ID NO: 1866 - protein, 17 aa, Artificial Sequence
  Synthetic Peptide
GRGGEEKKKEKEKEEQE

SEQ ID NO: 1867 - protein, 17 aa, Artificial Sequence
  Synthetic Peptide
RGGEEKKKEKEKEEQEE

SEQ ID NO: 1868 - protein, 17 aa, Artificial Sequence
  Synthetic Peptide
GGEEKKKEKEKEEQEER

SEQ ID NO: 1869 - protein, 17 aa, Artificial Sequence
  Synthetic Peptide
GEEKKKEKEKEEQEERE

SEQ ID NO: 1870 - protein, 17 aa, Artificial Sequence
  Synthetic Peptide
EEKKKEKEKEEQEERET

SEQ ID NO: 1871 - protein, 17 aa, Artificial Sequence
  Synthetic Peptide
EKKKEKEKEEQEERETK

SEQ ID NO: 1872 - protein, 17 aa, Artificial Sequence
  Synthetic Peptide
KKKEKEKEEQEERETKT

SEQ ID NO: 1873 - protein, 17 aa, Artificial Sequence
  Synthetic Peptide
KKEKEKEEQEERETKTP

SEQ ID NO: 1874 - protein, 17 aa, Artificial Sequence
  Synthetic Peptide
KEKEKEEQEERETKTPE

SEQ ID NO: 1875 - protein, 17 aa, Artificial Sequence
  Synthetic Peptide
EKEKEEQEERETKTPEC

SEQ ID NO: 1876 - protein, 17 aa, Artificial Sequence
  Synthetic Peptide
KEKEEQEERETKTPECP

SEQ ID NO: 1877 - protein, 17 aa, Artificial Sequence
  Synthetic Peptide
EKEEQEERETKTPECPS

SEQ ID NO: 1878 - protein, 17 aa, Artificial Sequence
  Synthetic Peptide
KEEQEERETKTPECPSH

SEQ ID NO: 1879 - protein, 17 aa, Artificial Sequence
  Synthetic Peptide
EEQEERETKTPECPSHT

SEQ ID NO: 1880 - protein, 17 aa, Artificial Sequence
  Synthetic Peptide
EQEERETKTPECPSHTQ

SEQ ID NO: 1881 - protein, 17 aa, Artificial Sequence
  Synthetic Peptide
QEERETKTPECPSHTQP

SEQ ID NO: 1882 - protein, 17 aa, Artificial Sequence
  Synthetic Peptide
EERETKTPECPSHTQPL

SEQ ID NO: 1883 - protein, 17 aa, Artificial Sequence
  Synthetic Peptide
ERETKTPECPSHTQPLG

SEQ ID NO: 1884 - protein, 17 aa, Artificial Sequence
  Synthetic Peptide
RETKTPECPSHTQPLGV

SEQ ID NO: 1885 - protein, 17 aa, Artificial Sequence
  Synthetic Peptide
ETKTPECPSHTQPLGVY

SEQ ID NO: 1886 - protein, 17 aa, Artificial Sequence
  Synthetic Peptide
TKTPECPSHTQPLGVYL

SEQ ID NO: 1887 - protein, 17 aa, Artificial Sequence
  Synthetic Peptide
KTPECPSHTQPLGVYLL

SEQ ID NO: 1888 - protein, 17 aa, Artificial Sequence
  Synthetic Peptide
TPECPSHTQPLGVYLLT

SEQ ID NO: 1889 - protein, 17 aa, Artificial Sequence
  Synthetic Peptide
PECPSHTQPLGVYLLTP

SEQ ID NO: 1890 - protein, 16 aa, Artificial Sequence
  Synthetic Peptide
RWPESPKAQASSVPTA

SEQ ID NO: 1891 - protein, 16 aa, Artificial Sequence
  Synthetic Peptide
WPESPKAQASSVPTAQ

SEQ ID NO: 1892 - protein, 16 aa, Artificial Sequence
  Synthetic Peptide
PESPKAQASSVPTAQP

SEQ ID NO: 1893 - protein, 16 aa, Artificial Sequence
  Synthetic Peptide
ESPKAQASSVPTAQPQ

SEQ ID NO: 1894 - protein, 16 aa, Artificial Sequence
  Synthetic Peptide
SPKAQASSVPTAQPQA

SEQ ID NO: 1895 - protein, 16 aa, Artificial Sequence
  Synthetic Peptide
PKAQASSVPTAQPQAE

SEQ ID NO: 1896 - protein, 16 aa, Artificial Sequence
  Synthetic Peptide
KAQASSVPTAQPQAEG

SEQ ID NO: 1897 - protein, 16 aa, Artificial Sequence
  Synthetic Peptide
AQASSVPTAQPQAEGS

SEQ ID NO: 1898 - protein, 16 aa, Artificial Sequence
  Synthetic Peptide
QASSVPTAQPQAEGSL

SEQ ID NO: 1899 - protein, 16 aa, Artificial Sequence
  Synthetic Peptide
ASSVPTAQPQAEGSLA

SEQ ID NO: 1900 - protein, 16 aa, Artificial Sequence
  Synthetic Peptide
SSVPTAQPQAEGSLAK

SEQ ID NO: 1901 - protein, 16 aa, Artificial Sequence
  Synthetic Peptide
SVPTAQPQAEGSLAKA

SEQ ID NO: 1902 - protein, 16 aa, Artificial Sequence
  Synthetic Peptide
VPTAQPQAEGSLAKAT

SEQ ID NO: 1903 - protein, 16 aa, Artificial Sequence
  Synthetic Peptide
PTAQPQAEGSLAKATT

SEQ ID NO: 1904 - protein, 16 aa, Artificial Sequence
  Synthetic Peptide
TAQPQAEGSLAKATTA

SEQ ID NO: 1905 - protein, 16 aa, Artificial Sequence
  Synthetic Peptide
AQPQAEGSLAKATTAP

SEQ ID NO: 1906 - protein, 16 aa, Artificial Sequence
  Synthetic Peptide
QPQAEGSLAKATTAPA

SEQ ID NO: 1907 - protein, 16 aa, Artificial Sequence
  Synthetic Peptide
PQAEGSLAKATTAPAT

SEQ ID NO: 1908 - protein, 16 aa, Artificial Sequence
  Synthetic Peptide
QAEGSLAKATTAPATT

SEQ ID NO: 1909 - protein, 16 aa, Artificial Sequence
  Synthetic Peptide
AEGSLAKATTAPATTR

SEQ ID NO: 1910 - protein, 16 aa, Artificial Sequence
  Synthetic Peptide
EGSLAKATTAPATTRN

SEQ ID NO: 1911 - protein, 16 aa, Artificial Sequence
  Synthetic Peptide
GSLAKATTAPATTRNT

SEQ ID NO: 1912 - protein, 16 aa, Artificial Sequence
  Synthetic Peptide
SLAKATTAPATTRNTG

SEQ ID NO: 1913 - protein, 16 aa, Artificial Sequence
  Synthetic Peptide
LAKATTAPATTRNTGR

SEQ ID NO: 1914 - protein, 16 aa, Artificial Sequence
  Synthetic Peptide
AKATTAPATTRNTGRG

SEQ ID NO: 1915 - protein, 16 aa, Artificial Sequence
  Synthetic Peptide
KATTAPATTRNTGRGG

SEQ ID NO: 1916 - protein, 16 aa, Artificial Sequence
  Synthetic Peptide
ATTAPATTRNTGRGGE

SEQ ID NO: 1917 - protein, 16 aa, Artificial Sequence
  Synthetic Peptide
TTAPATTRNTGRGGEE

SEQ ID NO: 1918 - protein, 16 aa, Artificial Sequence
  Synthetic Peptide
TAPATTRNTGRGGEEK

SEQ ID NO: 1919 - protein, 16 aa, Artificial Sequence
  Synthetic Peptide
APATTRNTGRGGEEKK

SEQ ID NO: 1920 - protein, 16 aa, Artificial Sequence
  Synthetic Peptide
PATTRNTGRGGEEKKK

SEQ ID NO: 1921 - protein, 16 aa, Artificial Sequence
  Synthetic Peptide
ATTRNTGRGGEEKKKE

SEQ ID NO: 1922 - protein, 16 aa, Artificial Sequence
  Synthetic Peptide
TTRNTGRGGEEKKKEK

SEQ ID NO: 1923 - protein, 16 aa, Artificial Sequence
  Synthetic Peptide
TRNTGRGGEEKKKEKE

SEQ ID NO: 1924 - protein, 16 aa, Artificial Sequence
  Synthetic Peptide
RNTGRGGEEKKKEKEK

SEQ ID NO: 1925 - protein, 16 aa, Artificial Sequence
  Synthetic Peptide
NTGRGGEEKKKEKEKE

SEQ ID NO: 1926 - protein, 16 aa, Artificial Sequence
  Synthetic Peptide
TGRGGEEKKKEKEKEE

SEQ ID NO: 1927 - protein, 16 aa, Artificial Sequence
  Synthetic Peptide
GRGGEEKKKEKEKEEQ

SEQ ID NO: 1928 - protein, 16 aa, Artificial Sequence
  Synthetic Peptide
RGGEEKKKEKEKEEQE

SEQ ID NO: 1929 - protein, 16 aa, Artificial Sequence
  Synthetic Peptide
GGEEKKKEKEKEEQEE

SEQ ID NO: 1930 - protein, 16 aa, Artificial Sequence
  Synthetic Peptide
GEEKKKEKEKEEQEER

SEQ ID NO: 1931 - protein, 16 aa, Artificial Sequence
  Synthetic Peptide
EEKKKEKEKEEQEERE

SEQ ID NO: 1932 - protein, 16 aa, Artificial Sequence
  Synthetic Peptide
EKKKEKEKEEQEERET

SEQ ID NO: 1933 - protein, 16 aa, Artificial Sequence
  Synthetic Peptide
KKKEKEKEEQEERETK

SEQ ID NO: 1934 - protein, 16 aa, Artificial Sequence
  Synthetic Peptide
KKEKEKEEQEERETKT

SEQ ID NO: 1935 - protein, 16 aa, Artificial Sequence
  Synthetic Peptide
KEKEKEEQEERETKTP

SEQ ID NO: 1936 - protein, 16 aa, Artificial Sequence
  Synthetic Peptide
EKEKEEQEERETKTPE

SEQ ID NO: 1937 - protein, 16 aa, Artificial Sequence
  Synthetic Peptide
KEKEEQEERETKTPEC

SEQ ID NO: 1938 - protein, 16 aa, Artificial Sequence
  Synthetic Peptide
EKEEQEERETKTPECP

SEQ ID NO: 1939 - protein, 16 aa, Artificial Sequence
  Synthetic Peptide
KEEQEERETKTPECPS

SEQ ID NO: 1940 - protein, 16 aa, Artificial Sequence
  Synthetic Peptide
EEQEERETKTPECPSH

SEQ ID NO: 1941 - protein, 16 aa, Artificial Sequence
  Synthetic Peptide
EQEERETKTPECPSHT

SEQ ID NO: 1942 - protein, 16 aa, Artificial Sequence
  Synthetic Peptide
QEERETKTPECPSHTQ

SEQ ID NO: 1943 - protein, 16 aa, Artificial Sequence
  Synthetic Peptide
EERETKTPECPSHTQP

SEQ ID NO: 1944 - protein, 16 aa, Artificial Sequence
  Synthetic Peptide
ERETKTPECPSHTQPL

SEQ ID NO: 1945 - protein, 16 aa, Artificial Sequence
  Synthetic Peptide
RETKTPECPSHTQPLG

SEQ ID NO: 1946 - protein, 16 aa, Artificial Sequence
  Synthetic Peptide
ETKTPECPSHTQPLGV

SEQ ID NO: 1947 - protein, 16 aa, Artificial Sequence
  Synthetic Peptide
TKTPECPSHTQPLGVY

SEQ ID NO: 1948 - protein, 16 aa, Artificial Sequence
  Synthetic Peptide
KTPECPSHTQPLGVYL

SEQ ID NO: 1949 - protein, 16 aa, Artificial Sequence
  Synthetic Peptide
TPECPSHTQPLGVYLL

SEQ ID NO: 1950 - protein, 16 aa, Artificial Sequence
  Synthetic Peptide
PECPSHTQPLGVYLLT

SEQ ID NO: 1951 - protein, 16 aa, Artificial Sequence
  Synthetic Peptide
ECPSHTQPLGVYLLTP

SEQ ID NO: 1952 - protein, 15 aa, Artificial Sequence
  Synthetic Peptide
RWPESPKAQASSVPT

SEQ ID NO: 1953 - protein, 15 aa, Artificial Sequence
  Synthetic Peptide
WPESPKAQASSVPTA

SEQ ID NO: 1954 - protein, 15 aa, Artificial Sequence
  Synthetic Peptide
PESPKAQASSVPTAQ

SEQ ID NO: 1955 - protein, 15 aa, Artificial Sequence
  Synthetic Peptide
ESPKAQASSVPTAQP

SEQ ID NO: 1956 - protein, 15 aa, Artificial Sequence
  Synthetic Peptide
SPKAQASSVPTAQPQ

SEQ ID NO: 1957 - protein, 15 aa, Artificial Sequence
  Synthetic Peptide
PKAQASSVPTAQPQA

SEQ ID NO: 1958 - protein, 15 aa, Artificial Sequence
  Synthetic Peptide
KAQASSVPTAQPQAE

SEQ ID NO: 1959 - protein, 15 aa, Artificial Sequence
  Synthetic Peptide
AQASSVPTAQPQAEG

SEQ ID NO: 1960 - protein, 15 aa, Artificial Sequence
  Synthetic Peptide
QASSVPTAQPQAEGS

SEQ ID NO: 1961 - protein, 15 aa, Artificial Sequence
  Synthetic Peptide
ASSVPTAQPQAEGSL

SEQ ID NO: 1962 - protein, 15 aa, Artificial Sequence
  Synthetic Peptide
SSVPTAQPQAEGSLA

SEQ ID NO: 1963 - protein, 15 aa, Artificial Sequence
  Synthetic Peptide
SVPTAQPQAEGSLAK

SEQ ID NO: 1964 - protein, 15 aa, Artificial Sequence
  Synthetic Peptide
VPTAQPQAEGSLAKA

SEQ ID NO: 1965 - protein, 15 aa, Artificial Sequence
  Synthetic Peptide
PTAQPQAEGSLAKAT

SEQ ID NO: 1966 - protein, 15 aa, Artificial Sequence
  Synthetic Peptide
TAQPQAEGSLAKATT

SEQ ID NO: 1967 - protein, 15 aa, Artificial Sequence
  Synthetic Peptide
AQPQAEGSLAKATTA

SEQ ID NO: 1968 - protein, 15 aa, Artificial Sequence
  Synthetic Peptide
QPQAEGSLAKATTAP

SEQ ID NO: 1969 - protein, 15 aa, Artificial Sequence
  Synthetic Peptide
PQAEGSLAKATTAPA

SEQ ID NO: 1970 - protein, 15 aa, Artificial Sequence
  Synthetic Peptide
QAEGSLAKATTAPAT

SEQ ID NO: 1971 - protein, 15 aa, Artificial Sequence
  Synthetic Peptide
AEGSLAKATTAPATT

SEQ ID NO: 1972 - protein, 15 aa, Artificial Sequence
  Synthetic Peptide
EGSLAKATTAPATTR

SEQ ID NO: 1973 - protein, 15 aa, Artificial Sequence
  Synthetic Peptide
GSLAKATTAPATTRN

SEQ ID NO: 1974 - protein, 15 aa, Artificial Sequence
  Synthetic Peptide
SLAKATTAPATTRNT

SEQ ID NO: 1975 - protein, 15 aa, Artificial Sequence
  Synthetic Peptide
LAKATTAPATTRNTG

SEQ ID NO: 1976 - protein, 15 aa, Artificial Sequence
  Synthetic Peptide
AKATTAPATTRNTGR

SEQ ID NO: 1977 - protein, 15 aa, Artificial Sequence
  Synthetic Peptide
KATTAPATTRNTGRG

SEQ ID NO: 1978 - protein, 15 aa, Artificial Sequence
  Synthetic Peptide
ATTAPATTRNTGRGG

SEQ ID NO: 1979 - protein, 15 aa, Artificial Sequence
  Synthetic Peptide
TTAPATTRNTGRGGE

SEQ ID NO: 1980 - protein, 15 aa, Artificial Sequence
  Synthetic Peptide
TAPATTRNTGRGGEE

SEQ ID NO: 1981 - protein, 15 aa, Artificial Sequence
  Synthetic Peptide
APATTRNTGRGGEEK

SEQ ID NO: 1982 - protein, 15 aa, Artificial Sequence
  Synthetic Peptide
PATTRNTGRGGEEKK

SEQ ID NO: 1983 - protein, 15 aa, Artificial Sequence
  Synthetic Peptide
ATTRNTGRGGEEKKK

SEQ ID NO: 1984 - protein, 15 aa, Artificial Sequence
  Synthetic Peptide
TTRNTGRGGEEKKKE

SEQ ID NO: 1985 - protein, 15 aa, Artificial Sequence
  Synthetic Peptide
TRNTGRGGEEKKKEK

SEQ ID NO: 1986 - protein, 15 aa, Artificial Sequence
  Synthetic Peptide
RNTGRGGEEKKKEKE

SEQ ID NO: 1987 - protein, 15 aa, Artificial Sequence
  Synthetic Peptide
NTGRGGEEKKKEKEK

SEQ ID NO: 1988 - protein, 15 aa, Artificial Sequence
  Synthetic Peptide
TGRGGEEKKKEKEKE

SEQ ID NO: 1989 - protein, 15 aa, Artificial Sequence
  Synthetic Peptide
GRGGEEKKKEKEKEE

SEQ ID NO: 1990 - protein, 15 aa, Artificial Sequence
  Synthetic Peptide
RGGEEKKKEKEKEEQ

SEQ ID NO: 1991 - protein, 15 aa, Artificial Sequence
  Synthetic Peptide
GGEEKKKEKEKEEQE

SEQ ID NO: 1992 - protein, 15 aa, Artificial Sequence
  Synthetic Peptide
GEEKKKEKEKEEQEE

SEQ ID NO: 1993 - protein, 15 aa, Artificial Sequence
  Synthetic Peptide
EEKKKEKEKEEQEER

SEQ ID NO: 1994 - protein, 15 aa, Artificial Sequence
  Synthetic Peptide
EKKKEKEKEEQEERE

SEQ ID NO: 1995 - protein, 15 aa, Artificial Sequence
  Synthetic Peptide
KKKEKEKEEQEERET

SEQ ID NO: 1996 - protein, 15 aa, Artificial Sequence
  Synthetic Peptide
KKEKEKEEQEERETK

SEQ ID NO: 1997 - protein, 15 aa, Artificial Sequence
  Synthetic Peptide
KEKEKEEQEERETKT

SEQ ID NO: 1998 - protein, 15 aa, Artificial Sequence
  Synthetic Peptide
EKEKEEQEERETKTP

SEQ ID NO: 1999 - protein, 15 aa, Artificial Sequence
  Synthetic Peptide
KEKEEQEERETKTPE

SEQ ID NO: 2000 - protein, 15 aa, Artificial Sequence
  Synthetic Peptide
EKEEQEERETKTPEC

SEQ ID NO: 2001 - protein, 15 aa, Artificial Sequence
  Synthetic Peptide
KEEQEERETKTPECP

SEQ ID NO: 2002 - protein, 15 aa, Artificial Sequence
  Synthetic Peptide
EEQEERETKTPECPS

SEQ ID NO: 2003 - protein, 15 aa, Artificial Sequence
  Synthetic Peptide
EQEERETKTPECPSH

SEQ ID NO: 2004 - protein, 15 aa, Artificial Sequence
  Synthetic Peptide
QEERETKTPECPSHT

SEQ ID NO: 2005 - protein, 15 aa, Artificial Sequence
  Synthetic Peptide
EERETKTPECPSHTQ

SEQ ID NO: 2006 - protein, 15 aa, Artificial Sequence
  Synthetic Peptide
ERETKTPECPSHTQP

SEQ ID NO: 2007 - protein, 15 aa, Artificial Sequence
  Synthetic Peptide
RETKTPECPSHTQPL

SEQ ID NO: 2008 - protein, 15 aa, Artificial Sequence
  Synthetic Peptide
ETKTPECPSHTQPLG

SEQ ID NO: 2009 - protein, 15 aa, Artificial Sequence
  Synthetic Peptide
TKTPECPSHTQPLGV

SEQ ID NO: 2010 - protein, 15 aa, Artificial Sequence
  Synthetic Peptide
KTPECPSHTQPLGVY

SEQ ID NO: 2011 - protein, 15 aa, Artificial Sequence
  Synthetic Peptide
TPECPSHTQPLGVYL

SEQ ID NO: 2012 - protein, 15 aa, Artificial Sequence
  Synthetic Peptide
PECPSHTQPLGVYLL

SEQ ID NO: 2013 - protein, 15 aa, Artificial Sequence
  Synthetic Peptide
ECPSHTQPLGVYLLT

SEQ ID NO: 2014 - protein, 15 aa, Artificial Sequence
  Synthetic Peptide
CPSHTQPLGVYLLTP

SEQ ID NO: 2015 - protein, 14 aa, Artificial Sequence
  Synthetic Peptide
RWPESPKAQASSVP

SEQ ID NO: 2016 - protein, 14 aa, Artificial Sequence
  Synthetic Peptide
WPESPKAQASSVPT

SEQ ID NO: 2017 - protein, 14 aa, Artificial Sequence
  Synthetic Peptide
PESPKAQASSVPTA

SEQ ID NO: 2018 - protein, 14 aa, Artificial Sequence
  Synthetic Peptide
ESPKAQASSVPTAQ

SEQ ID NO: 2019 - protein, 14 aa, Artificial Sequence
  Synthetic Peptide
SPKAQASSVPTAQP

SEQ ID NO: 2020 - protein, 14 aa, Artificial Sequence
  Synthetic Peptide
PKAQASSVPTAQPQ

SEQ ID NO: 2021 - protein, 14 aa, Artificial Sequence
  Synthetic Peptide
KAQASSVPTAQPQA

SEQ ID NO: 2022 - protein, 14 aa, Artificial Sequence
  Synthetic Peptide
AQASSVPTAQPQAE

SEQ ID NO: 2023 - protein, 14 aa, Artificial Sequence
  Synthetic Peptide
QASSVPTAQPQAEG

SEQ ID NO: 2024 - protein, 14 aa, Artificial Sequence
  Synthetic Peptide
ASSVPTAQPQAEGS

SEQ ID NO: 2025 - protein, 14 aa, Artificial Sequence
  Synthetic Peptide
SSVPTAQPQAEGSL

SEQ ID NO: 2026 - protein, 14 aa, Artificial Sequence
  Synthetic Peptide
SVPTAQPQAEGSLA

SEQ ID NO: 2027 - protein, 14 aa, Artificial Sequence
  Synthetic Peptide
VPTAQPQAEGSLAK

SEQ ID NO: 2028 - protein, 14 aa, Artificial Sequence
  Synthetic Peptide
PTAQPQAEGSLAKA

SEQ ID NO: 2029 - protein, 14 aa, Artificial Sequence
  Synthetic Peptide
TAQPQAEGSLAKAT

SEQ ID NO: 2030 - protein, 14 aa, Artificial Sequence
  Synthetic Peptide
AQPQAEGSLAKATT

SEQ ID NO: 2031 - protein, 14 aa, Artificial Sequence
  Synthetic Peptide
QPQAEGSLAKATTA

SEQ ID NO: 2032 - protein, 14 aa, Artificial Sequence
  Synthetic Peptide
PQAEGSLAKATTAP

SEQ ID NO: 2033 - protein, 14 aa, Artificial Sequence
  Synthetic Peptide
QAEGSLAKATTAPA

SEQ ID NO: 2034 - protein, 14 aa, Artificial Sequence
  Synthetic Peptide
AEGSLAKATTAPAT

SEQ ID NO: 2035 - protein, 14 aa, Artificial Sequence
  Synthetic Peptide
EGSLAKATTAPATT

SEQ ID NO: 2036 - protein, 14 aa, Artificial Sequence
  Synthetic Peptide
GSLAKATTAPATTR

SEQ ID NO: 2037 - protein, 14 aa, Artificial Sequence
  Synthetic Peptide
SLAKATTAPATTRN

SEQ ID NO: 2038 - protein, 14 aa, Artificial Sequence
  Synthetic Peptide
LAKATTAPATTRNT

SEQ ID NO: 2039 - protein, 14 aa, Artificial Sequence
  Synthetic Peptide
AKATTAPATTRNTG

SEQ ID NO: 2040 - protein, 14 aa, Artificial Sequence
  Synthetic Peptide
KATTAPATTRNTGR

SEQ ID NO: 2041 - protein, 14 aa, Artificial Sequence
  Synthetic Peptide
ATTAPATTRNTGRG

SEQ ID NO: 2042 - protein, 14 aa, Artificial Sequence
  Synthetic Peptide
TTAPATTRNTGRGG

SEQ ID NO: 2043 - protein, 14 aa, Artificial Sequence
  Synthetic Peptide
TAPATTRNTGRGGE

SEQ ID NO: 2044 - protein, 14 aa, Artificial Sequence
  Synthetic Peptide
APATTRNTGRGGEE

SEQ ID NO: 2045 - protein, 14 aa, Artificial Sequence
  Synthetic Peptide
PATTRNTGRGGEEK

SEQ ID NO: 2046 - protein, 14 aa, Artificial Sequence
  Synthetic Peptide
ATTRNTGRGGEEKK

SEQ ID NO: 2047 - protein, 14 aa, Artificial Sequence
  Synthetic Peptide
TTRNTGRGGEEKKK

SEQ ID NO: 2048 - protein, 14 aa, Artificial Sequence
  Synthetic Peptide
TRNTGRGGEEKKKE

SEQ ID NO: 2049 - protein, 14 aa, Artificial Sequence
  Synthetic Peptide
RNTGRGGEEKKKEK

SEQ ID NO: 2050 - protein, 14 aa, Artificial Sequence
  Synthetic Peptide
NTGRGGEEKKKEKE

SEQ ID NO: 2051 - protein, 14 aa, Artificial Sequence
  Synthetic Peptide
TGRGGEEKKKEKEK

SEQ ID NO: 2052 - protein, 14 aa, Artificial Sequence
  Synthetic Peptide
GRGGEEKKKEKEKE

SEQ ID NO: 2053 - protein, 14 aa, Artificial Sequence
  Synthetic Peptide
RGGEEKKKEKEKEE

SEQ ID NO: 2054 - protein, 14 aa, Artificial Sequence
  Synthetic Peptide
GGEEKKKEKEKEEQ

SEQ ID NO: 2055 - protein, 14 aa, Artificial Sequence
  Synthetic Peptide
GEEKKKEKEKEEQE

SEQ ID NO: 2056 - protein, 14 aa, Artificial Sequence
  Synthetic Peptide
EEKKKEKEKEEQEE

SEQ ID NO: 2057 - protein, 14 aa, Artificial Sequence
  Synthetic Peptide
EKKKEKEKEEQEER

SEQ ID NO: 2058 - protein, 14 aa, Artificial Sequence
  Synthetic Peptide
KKKEKEKEEQEERE

SEQ ID NO: 2059 - protein, 14 aa, Artificial Sequence
  Synthetic Peptide
KKEKEKEEQEERET

SEQ ID NO: 2060 - protein, 14 aa, Artificial Sequence
  Synthetic Peptide
KEKEKEEQEERETK

SEQ ID NO: 2061 - protein, 14 aa, Artificial Sequence
  Synthetic Peptide
EKEKEEQEERETKT

SEQ ID NO: 2062 - protein, 14 aa, Artificial Sequence
  Synthetic Peptide
KEKEEQEERETKTP

SEQ ID NO: 2063 - protein, 14 aa, Artificial Sequence
  Synthetic Peptide
EKEEQEERETKTPE

SEQ ID NO: 2064 - protein, 14 aa, Artificial Sequence
  Synthetic Peptide
KEEQEERETKTPEC

SEQ ID NO: 2065 - protein, 14 aa, Artificial Sequence
  Synthetic Peptide
EEQEERETKTPECP

SEQ ID NO: 2066 - protein, 14 aa, Artificial Sequence
  Synthetic Peptide
EQEERETKTPECPS

SEQ ID NO: 2067 - protein, 14 aa, Artificial Sequence
  Synthetic Peptide
QEERETKTPECPSH

SEQ ID NO: 2068 - protein, 14 aa, Artificial Sequence
  Synthetic Peptide
EERETKTPECPSHT

SEQ ID NO: 2069 - protein, 14 aa, Artificial Sequence
  Synthetic Peptide
ERETKTPECPSHTQ

SEQ ID NO: 2070 - protein, 14 aa, Artificial Sequence
  Synthetic Peptide
RETKTPECPSHTQP

SEQ ID NO: 2071 - protein, 14 aa, Artificial Sequence
  Synthetic Peptide
ETKTPECPSHTQPL

SEQ ID NO: 2072 - protein, 14 aa, Artificial Sequence
  Synthetic Peptide
TKTPECPSHTQPLG

SEQ ID NO: 2073 - protein, 14 aa, Artificial Sequence
  Synthetic Peptide
KTPECPSHTQPLGV

SEQ ID NO: 2074 - protein, 14 aa, Artificial Sequence
  Synthetic Peptide
TPECPSHTQPLGVY

SEQ ID NO: 2075 - protein, 14 aa, Artificial Sequence
  Synthetic Peptide
PECPSHTQPLGVYL

SEQ ID NO: 2076 - protein, 14 aa, Artificial Sequence
  Synthetic Peptide
ECPSHTQPLGVYLL

SEQ ID NO: 2077 - protein, 14 aa, Artificial Sequence
  Synthetic Peptide
CPSHTQPLGVYLLT

SEQ ID NO: 2078 - protein, 14 aa, Artificial Sequence
  Synthetic Peptide
PSHTQPLGVYLLTP

SEQ ID NO: 2079 - protein, 13 aa, Artificial Sequence
  Synthetic Peptide
RWPESPKAQASSV

SEQ ID NO: 2080 - protein, 13 aa, Artificial Sequence
  Synthetic Peptide
WPESPKAQASSVP

SEQ ID NO: 2081 - protein, 13 aa, Artificial Sequence
  Synthetic Peptide
PESPKAQASSVPT

SEQ ID NO: 2082 - protein, 13 aa, Artificial Sequence
  Synthetic Peptide
ESPKAQASSVPTA

SEQ ID NO: 2083 - protein, 13 aa, Artificial Sequence
  Synthetic Peptide
SPKAQASSVPTAQ

SEQ ID NO: 2084 - protein, 13 aa, Artificial Sequence
  Synthetic Peptide
PKAQASSVPTAQP

SEQ ID NO: 2085 - protein, 13 aa, Artificial Sequence
  Synthetic Peptide
KAQASSVPTAQPQ

SEQ ID NO: 2086 - protein, 13 aa, Artificial Sequence
  Synthetic Peptide
AQASSVPTAQPQA

SEQ ID NO: 2087 - protein, 13 aa, Artificial Sequence
  Synthetic Peptide
QASSVPTAQPQAE

SEQ ID NO: 2088 - protein, 13 aa, Artificial Sequence
  Synthetic Peptide
ASSVPTAQPQAEG

SEQ ID NO: 2089 - protein, 13 aa, Artificial Sequence
  Synthetic Peptide
SSVPTAQPQAEGS

SEQ ID NO: 2090 - protein, 13 aa, Artificial Sequence
  Synthetic Peptide
SVPTAQPQAEGSL

SEQ ID NO: 2091 - protein, 13 aa, Artificial Sequence
  Synthetic Peptide
VPTAQPQAEGSLA

SEQ ID NO: 2092 - protein, 13 aa, Artificial Sequence
  Synthetic Peptide
PTAQPQAEGSLAK

SEQ ID NO: 2093 - protein, 13 aa, Artificial Sequence
  Synthetic Peptide
TAQPQAEGSLAKA

SEQ ID NO: 2094 - protein, 13 aa, Artificial Sequence
  Synthetic Peptide
AQPQAEGSLAKAT

SEQ ID NO: 2095 - protein, 13 aa, Artificial Sequence
  Synthetic Peptide
QPQAEGSLAKATT

SEQ ID NO: 2096 - protein, 13 aa, Artificial Sequence
  Synthetic Peptide
PQAEGSLAKATTA

SEQ ID NO: 2097 - protein, 13 aa, Artificial Sequence
  Synthetic Peptide
QAEGSLAKATTAP

SEQ ID NO: 2098 - protein, 13 aa, Artificial Sequence
  Synthetic Peptide
AEGSLAKATTAPA

SEQ ID NO: 2099 - protein, 13 aa, Artificial Sequence
  Synthetic Peptide
EGSLAKATTAPAT

SEQ ID NO: 2100 - protein, 13 aa, Artificial Sequence
  Synthetic Peptide
GSLAKATTAPATT

SEQ ID NO: 2101 - protein, 13 aa, Artificial Sequence
  Synthetic Peptide
SLAKATTAPATTR

SEQ ID NO: 2102 - protein, 13 aa, Artificial Sequence
  Synthetic Peptide
LAKATTAPATTRN

SEQ ID NO: 2103 - protein, 13 aa, Artificial Sequence
  Synthetic Peptide
AKATTAPATTRNT

SEQ ID NO: 2104 - protein, 13 aa, Artificial Sequence
  Synthetic Peptide
KATTAPATTRNTG

SEQ ID NO: 2105 - protein, 13 aa, Artificial Sequence
  Synthetic Peptide
ATTAPATTRNTGR

SEQ ID NO: 2106 - protein, 13 aa, Artificial Sequence
  Synthetic Peptide
TTAPATTRNTGRG

SEQ ID NO: 2107 - protein, 13 aa, Artificial Sequence
  Synthetic Peptide
TAPATTRNTGRGG

SEQ ID NO: 2108 - protein, 13 aa, Artificial Sequence
  Synthetic Peptide
APATTRNTGRGGE

SEQ ID NO: 2109 - protein, 13 aa, Artificial Sequence
  Synthetic Peptide
PATTRNTGRGGEE

SEQ ID NO: 2110 - protein, 13 aa, Artificial Sequence
  Synthetic Peptide
ATTRNTGRGGEEK

SEQ ID NO: 2111 - protein, 13 aa, Artificial Sequence
  Synthetic Peptide
TTRNTGRGGEEKK

SEQ ID NO: 2112 - protein, 13 aa, Artificial Sequence
  Synthetic Peptide
TRNTGRGGEEKKK

SEQ ID NO: 2113 - protein, 13 aa, Artificial Sequence
  Synthetic Peptide
RNTGRGGEEKKKE

SEQ ID NO: 2114 - protein, 13 aa, Artificial Sequence
  Synthetic Peptide
NTGRGGEEKKKEK

SEQ ID NO: 2115 - protein, 13 aa, Artificial Sequence
  Synthetic Peptide
TGRGGEEKKKEKE

SEQ ID NO: 2116 - protein, 13 aa, Artificial Sequence
  Synthetic Peptide
GRGGEEKKKEKEK

SEQ ID NO: 2117 - protein, 13 aa, Artificial Sequence
  Synthetic Peptide
RGGEEKKKEKEKE

SEQ ID NO: 2118 - protein, 13 aa, Artificial Sequence
  Synthetic Peptide
GGEEKKKEKEKEE

SEQ ID NO: 2119 - protein, 13 aa, Artificial Sequence
  Synthetic Peptide
GEEKKKEKEKEEQ

SEQ ID NO: 2120 - protein, 13 aa, Artificial Sequence
  Synthetic Peptide
EEKKKEKEKEEQE

SEQ ID NO: 2121 - protein, 13 aa, Artificial Sequence
  Synthetic Peptide
EKKKEKEKEEQEE

SEQ ID NO: 2122 - protein, 13 aa, Artificial Sequence
  Synthetic Peptide
KKKEKEKEEQEER

SEQ ID NO: 2123 - protein, 13 aa, Artificial Sequence
  Synthetic Peptide
KKEKEKEEQEERE

SEQ ID NO: 2124 - protein, 13 aa, Artificial Sequence
  Synthetic Peptide
KEKEKEEQEERET

SEQ ID NO: 2125 - protein, 13 aa, Artificial Sequence
  Synthetic Peptide
EKEKEEQEERETK

SEQ ID NO: 2126 - protein, 13 aa, Artificial Sequence
  Synthetic Peptide
KEKEEQEERETKT

SEQ ID NO: 2127 - protein, 13 aa, Artificial Sequence
  Synthetic Peptide
EKEEQEERETKTP

SEQ ID NO: 2128 - protein, 13 aa, Artificial Sequence
  Synthetic Peptide
KEEQEERETKTPE

SEQ ID NO: 2129 - protein, 13 aa, Artificial Sequence
  Synthetic Peptide
EEQEERETKTPEC

SEQ ID NO: 2130 - protein, 13 aa, Artificial Sequence
  Synthetic Peptide
EQEERETKTPECP

SEQ ID NO: 2131 - protein, 13 aa, Artificial Sequence
  Synthetic Peptide
QEERETKTPECPS

SEQ ID NO: 2132 - protein, 13 aa, Artificial Sequence
  Synthetic Peptide
EERETKTPECPSH

SEQ ID NO: 2133 - protein, 13 aa, Artificial Sequence
  Synthetic Peptide
ERETKTPECPSHT

SEQ ID NO: 2134 - protein, 13 aa, Artificial Sequence
  Synthetic Peptide
RETKTPECPSHTQ

SEQ ID NO: 2135 - protein, 13 aa, Artificial Sequence
  Synthetic Peptide
ETKTPECPSHTQP

SEQ ID NO: 2136 - protein, 13 aa, Artificial Sequence
  Synthetic Peptide
TKTPECPSHTQPL

SEQ ID NO: 2137 - protein, 13 aa, Artificial Sequence
  Synthetic Peptide
KTPECPSHTQPLG

SEQ ID NO: 2138 - protein, 13 aa, Artificial Sequence
  Synthetic Peptide
TPECPSHTQPLGV

SEQ ID NO: 2139 - protein, 13 aa, Artificial Sequence
  Synthetic Peptide
PECPSHTQPLGVY

SEQ ID NO: 2140 - protein, 13 aa, Artificial Sequence
  Synthetic Peptide
ECPSHTQPLGVYL

SEQ ID NO: 2141 - protein, 13 aa, Artificial Sequence
  Synthetic Peptide
CPSHTQPLGVYLL

SEQ ID NO: 2142 - protein, 13 aa, Artificial Sequence
  Synthetic Peptide
PSHTQPLGVYLLT

SEQ ID NO: 2143 - protein, 13 aa, Artificial Sequence
  Synthetic Peptide
SHTQPLGVYLLTP

SEQ ID NO: 2144 - protein, 12 aa, Artificial Sequence
  Synthetic Peptide
RWPESPKAQASS

SEQ ID NO: 2145 - protein, 12 aa, Artificial Sequence
  Synthetic Peptide
WPESPKAQASSV

SEQ ID NO: 2146 - protein, 12 aa, Artificial Sequence
  Synthetic Peptide
PESPKAQASSVP

SEQ ID NO: 2147 - protein, 12 aa, Artificial Sequence
  Synthetic Peptide
ESPKAQASSVPT

SEQ ID NO: 2148 - protein, 12 aa, Artificial Sequence
  Synthetic Peptide
SPKAQASSVPTA

SEQ ID NO: 2149 - protein, 12 aa, Artificial Sequence
  Synthetic Peptide
PKAQASSVPTAQ

SEQ ID NO: 2150 - protein, 12 aa, Artificial Sequence
  Synthetic Peptide
KAQASSVPTAQP

SEQ ID NO: 2151 - protein, 12 aa, Artificial Sequence
  Synthetic Peptide
AQASSVPTAQPQ

SEQ ID NO: 2152 - protein, 12 aa, Artificial Sequence
  Synthetic Peptide
QASSVPTAQPQA

SEQ ID NO: 2153 - protein, 12 aa, Artificial Sequence
  Synthetic Peptide
ASSVPTAQPQAE

SEQ ID NO: 2154 - protein, 12 aa, Artificial Sequence
  Synthetic Peptide
SSVPTAQPQAEG

SEQ ID NO: 2155 - protein, 12 aa, Artificial Sequence
  Synthetic Peptide
SVPTAQPQAEGS

SEQ ID NO: 2156 - protein, 12 aa, Artificial Sequence
  Synthetic Peptide
VPTAQPQAEGSL

SEQ ID NO: 2157 - protein, 12 aa, Artificial Sequence
  Synthetic Peptide
PTAQPQAEGSLA

SEQ ID NO: 2158 - protein, 12 aa, Artificial Sequence
  Synthetic Peptide
TAQPQAEGSLAK

SEQ ID NO: 2159 - protein, 12 aa, Artificial Sequence
  Synthetic Peptide
AQPQAEGSLAKA

SEQ ID NO: 2160 - protein, 12 aa, Artificial Sequence
  Synthetic Peptide
QPQAEGSLAKAT

SEQ ID NO: 2161 - protein, 12 aa, Artificial Sequence
  Synthetic Peptide
PQAEGSLAKATT

SEQ ID NO: 2162 - protein, 12 aa, Artificial Sequence
  Synthetic Peptide
QAEGSLAKATTA

SEQ ID NO: 2163 - protein, 12 aa, Artificial Sequence
  Synthetic Peptide
AEGSLAKATTAP

SEQ ID NO: 2164 - protein, 12 aa, Artificial Sequence
  Synthetic Peptide
EGSLAKATTAPA

SEQ ID NO: 2165 - protein, 12 aa, Artificial Sequence
  Synthetic Peptide
GSLAKATTAPAT

SEQ ID NO: 2166 - protein, 12 aa, Artificial Sequence
  Synthetic Peptide
SLAKATTAPATT

SEQ ID NO: 2167 - protein, 12 aa, Artificial Sequence
  Synthetic Peptide
LAKATTAPATTR

SEQ ID NO: 2168 - protein, 12 aa, Artificial Sequence
  Synthetic Peptide
AKATTAPATTRN

SEQ ID NO: 2169 - protein, 12 aa, Artificial Sequence
  Synthetic Peptide
KATTAPATTRNT

SEQ ID NO: 2170 - protein, 12 aa, Artificial Sequence
  Synthetic Peptide
ATTAPATTRNTG

SEQ ID NO: 2171 - protein, 12 aa, Artificial Sequence
  Synthetic Peptide
TTAPATTRNTGR

SEQ ID NO: 2172 - protein, 12 aa, Artificial Sequence
  Synthetic Peptide
TAPATTRNTGRG

SEQ ID NO: 2173 - protein, 12 aa, Artificial Sequence
  Synthetic Peptide
APATTRNTGRGG

SEQ ID NO: 2174 - protein, 12 aa, Artificial Sequence
  Synthetic Peptide
PATTRNTGRGGE

SEQ ID NO: 2175 - protein, 12 aa, Artificial Sequence
  Synthetic Peptide
ATTRNTGRGGEE

SEQ ID NO: 2176 - protein, 12 aa, Artificial Sequence
  Synthetic Peptide
TTRNTGRGGEEK

SEQ ID NO: 2177 - protein, 12 aa, Artificial Sequence
  Synthetic Peptide
TRNTGRGGEEKK

SEQ ID NO: 2178 - protein, 12 aa, Artificial Sequence
  Synthetic Peptide
RNTGRGGEEKKK

SEQ ID NO: 2179 - protein, 12 aa, Artificial Sequence
  Synthetic Peptide
NTGRGGEEKKKE

SEQ ID NO: 2180 - protein, 12 aa, Artificial Sequence
  Synthetic Peptide
TGRGGEEKKKEK

SEQ ID NO: 2181 - protein, 12 aa, Artificial Sequence
  Synthetic Peptide
GRGGEEKKKEKE

SEQ ID NO: 2182 - protein, 12 aa, Artificial Sequence
  Synthetic Peptide
RGGEEKKKEKEK

SEQ ID NO: 2183 - protein, 12 aa, Artificial Sequence
  Synthetic Peptide
GGEEKKKEKEKE

SEQ ID NO: 2184 - protein, 12 aa, Artificial Sequence
  Synthetic Peptide
GEEKKKEKEKEE

SEQ ID NO: 2185 - protein, 12 aa, Artificial Sequence
  Synthetic Peptide
EEKKKEKEKEEQ

SEQ ID NO: 2186 - protein, 12 aa, Artificial Sequence
  Synthetic Peptide
EKKKEKEKEEQE

SEQ ID NO: 2187 - protein, 12 aa, Artificial Sequence
  Synthetic Peptide
KKKEKEKEEQEE

SEQ ID NO: 2188 - protein, 12 aa, Artificial Sequence
  Synthetic Peptide
KKEKEKEEQEER

SEQ ID NO: 2189 - protein, 12 aa, Artificial Sequence
  Synthetic Peptide
KEKEKEEQEERE

SEQ ID NO: 2190 - protein, 12 aa, Artificial Sequence
  Synthetic Peptide
EKEKEEQEERET

SEQ ID NO: 2191 - protein, 12 aa, Artificial Sequence
  Synthetic Peptide
KEKEEQEERETK

SEQ ID NO: 2192 - protein, 12 aa, Artificial Sequence
  Synthetic Peptide
EKEEQEERETKT

SEQ ID NO: 2193 - protein, 12 aa, Artificial Sequence
  Synthetic Peptide
KEEQEERETKTP

SEQ ID NO: 2194 - protein, 12 aa, Artificial Sequence
  Synthetic Peptide
EEQEERETKTPE

SEQ ID NO: 2195 - protein, 12 aa, Artificial Sequence
  Synthetic Peptide
EQEERETKTPEC

SEQ ID NO: 2196 - protein, 12 aa, Artificial Sequence
  Synthetic Peptide
QEERETKTPECP

SEQ ID NO: 2197 - protein, 12 aa, Artificial Sequence
  Synthetic Peptide
EERETKTPECPS

SEQ ID NO: 2198 - protein, 12 aa, Artificial Sequence
  Synthetic Peptide
ERETKTPECPSH

SEQ ID NO: 2199 - protein, 12 aa, Artificial Sequence
  Synthetic Peptide
RETKTPECPSHT

SEQ ID NO: 2200 - protein, 12 aa, Artificial Sequence
  Synthetic Peptide
ETKTPECPSHTQ

SEQ ID NO: 2201 - protein, 12 aa, Artificial Sequence
  Synthetic Peptide
TKTPECPSHTQP

SEQ ID NO: 2202 - protein, 12 aa, Artificial Sequence
  Synthetic Peptide
KTPECPSHTQPL

SEQ ID NO: 2203 - protein, 12 aa, Artificial Sequence
  Synthetic Peptide
TPECPSHTQPLG

SEQ ID NO: 2204 - protein, 12 aa, Artificial Sequence
  Synthetic Peptide
PECPSHTQPLGV

SEQ ID NO: 2205 - protein, 12 aa, Artificial Sequence
  Synthetic Peptide
ECPSHTQPLGVY

SEQ ID NO: 2206 - protein, 12 aa, Artificial Sequence
  Synthetic Peptide
CPSHTQPLGVYL

SEQ ID NO: 2207 - protein, 12 aa, Artificial Sequence
  Synthetic Peptide
PSHTQPLGVYLL

SEQ ID NO: 2208 - protein, 12 aa, Artificial Sequence
  Synthetic Peptide
SHTQPLGVYLLT

SEQ ID NO: 2209 - protein, 12 aa, Artificial Sequence
  Synthetic Peptide
HTQPLGVYLLTP

SEQ ID NO: 2210 - protein, 11 aa, Artificial Sequence
  Synthetic Peptide
RWPESPKAQAS

SEQ ID NO: 2211 - protein, 11 aa, Artificial Sequence
  Synthetic Peptide
WPESPKAQASS

SEQ ID NO: 2212 - protein, 11 aa, Artificial Sequence
  Synthetic Peptide
PESPKAQASSV

SEQ ID NO: 2213 - protein, 11 aa, Artificial Sequence
  Synthetic Peptide
ESPKAQASSVP

SEQ ID NO: 2214 - protein, 11 aa, Artificial Sequence
  Synthetic Peptide
SPKAQASSVPT

SEQ ID NO: 2215 - protein, 11 aa, Artificial Sequence
  Synthetic Peptide
PKAQASSVPTA

SEQ ID NO: 2216 - protein, 11 aa, Artificial Sequence
  Synthetic Peptide
KAQASSVPTAQ

SEQ ID NO: 2217 - protein, 11 aa, Artificial Sequence
  Synthetic Peptide
AQASSVPTAQP

SEQ ID NO: 2218 - protein, 11 aa, Artificial Sequence
  Synthetic Peptide
QASSVPTAQPQ

SEQ ID NO: 2219 - protein, 11 aa, Artificial Sequence
  Synthetic Peptide
ASSVPTAQPQA

SEQ ID NO: 2220 - protein, 11 aa, Artificial Sequence
  Synthetic Peptide
SSVPTAQPQAE

SEQ ID NO: 2221 - protein, 11 aa, Artificial Sequence
  Synthetic Peptide
SVPTAQPQAEG

SEQ ID NO: 2222 - protein, 11 aa, Artificial Sequence
  Synthetic Peptide
VPTAQPQAEGS

SEQ ID NO: 2223 - protein, 11 aa, Artificial Sequence
  Synthetic Peptide
PTAQPQAEGSL

SEQ ID NO: 2224 - protein, 11 aa, Artificial Sequence
  Synthetic Peptide
TAQPQAEGSLA

SEQ ID NO: 2225 - protein, 11 aa, Artificial Sequence
  Synthetic Peptide
AQPQAEGSLAK

SEQ ID NO: 2226 - protein, 11 aa, Artificial Sequence
  Synthetic Peptide
QPQAEGSLAKA

SEQ ID NO: 2227 - protein, 11 aa, Artificial Sequence
  Synthetic Peptide
PQAEGSLAKAT

SEQ ID NO: 2228 - protein, 11 aa, Artificial Sequence
  Synthetic Peptide
QAEGSLAKATT

SEQ ID NO: 2229 - protein, 11 aa, Artificial Sequence
  Synthetic Peptide
AEGSLAKATTA

SEQ ID NO: 2230 - protein, 11 aa, Artificial Sequence
  Synthetic Peptide
EGSLAKATTAP

SEQ ID NO: 2231 - protein, 11 aa, Artificial Sequence
  Synthetic Peptide
GSLAKATTAPA

SEQ ID NO: 2232 - protein, 11 aa, Artificial Sequence
  Synthetic Peptide
SLAKATTAPAT

SEQ ID NO: 2233 - protein, 11 aa, Artificial Sequence
  Synthetic Peptide
LAKATTAPATT

SEQ ID NO: 2234 - protein, 11 aa, Artificial Sequence
  Synthetic Peptide
AKATTAPATTR

SEQ ID NO: 2235 - protein, 11 aa, Artificial Sequence
  Synthetic Peptide
KATTAPATTRN

SEQ ID NO: 2236 - protein, 11 aa, Artificial Sequence
  Synthetic Peptide
ATTAPATTRNT

SEQ ID NO: 2237 - protein, 11 aa, Artificial Sequence
  Synthetic Peptide
TTAPATTRNTG

SEQ ID NO: 2238 - protein, 11 aa, Artificial Sequence
  Synthetic Peptide
TAPATTRNTGR

SEQ ID NO: 2239 - protein, 11 aa, Artificial Sequence
  Synthetic Peptide
APATTRNTGRG

SEQ ID NO: 2240 - protein, 11 aa, Artificial Sequence
  Synthetic Peptide
PATTRNTGRGG

SEQ ID NO: 2241 - protein, 11 aa, Artificial Sequence
  Synthetic Peptide
ATTRNTGRGGE

SEQ ID NO: 2242 - protein, 11 aa, Artificial Sequence
  Synthetic Peptide
TTRNTGRGGEE

SEQ ID NO: 2243 - protein, 11 aa, Artificial Sequence
  Synthetic Peptide
TRNTGRGGEEK

SEQ ID NO: 2244 - protein, 11 aa, Artificial Sequence
  Synthetic Peptide
RNTGRGGEEKK

SEQ ID NO: 2245 - protein, 11 aa, Artificial Sequence
  Synthetic Peptide
NTGRGGEEKKK

SEQ ID NO: 2246 - protein, 11 aa, Artificial Sequence
  Synthetic Peptide
TGRGGEEKKKE

SEQ ID NO: 2247 - protein, 11 aa, Artificial Sequence
  Synthetic Peptide
GRGGEEKKKEK

SEQ ID NO: 2248 - protein, 11 aa, Artificial Sequence
  Synthetic Peptide
RGGEEKKKEKE

SEQ ID NO: 2249 - protein, 11 aa, Artificial Sequence
  Synthetic Peptide
GGEEKKKEKEK

SEQ ID NO: 2250 - protein, 11 aa, Artificial Sequence
  Synthetic Peptide
GEEKKKEKEKE

SEQ ID NO: 2251 - protein, 11 aa, Artificial Sequence
  Synthetic Peptide
EEKKKEKEKEE

SEQ ID NO: 2252 - protein, 11 aa, Artificial Sequence
  Synthetic Peptide
EKKKEKEKEEQ

SEQ ID NO: 2253 - protein, 11 aa, Artificial Sequence
  Synthetic Peptide
KKKEKEKEEQE

SEQ ID NO: 2254 - protein, 11 aa, Artificial Sequence
  Synthetic Peptide
KKEKEKEEQEE

SEQ ID NO: 2255 - protein, 11 aa, Artificial Sequence
  Synthetic Peptide
KEKEKEEQEER

SEQ ID NO: 2256 - protein, 11 aa, Artificial Sequence
  Synthetic Peptide
EKEKEEQEERE

SEQ ID NO: 2257 - protein, 11 aa, Artificial Sequence
  Synthetic Peptide
KEKEEQEERET

SEQ ID NO: 2258 - protein, 11 aa, Artificial Sequence
  Synthetic Peptide
EKEEQEERETK

SEQ ID NO: 2259 - protein, 11 aa, Artificial Sequence
  Synthetic Peptide
KEEQEERETKT

SEQ ID NO: 2260 - protein, 11 aa, Artificial Sequence
  Synthetic Peptide
EEQEERETKTP

SEQ ID NO: 2261 - protein, 11 aa, Artificial Sequence
  Synthetic Peptide
EQEERETKTPE

SEQ ID NO: 2262 - protein, 11 aa, Artificial Sequence
  Synthetic Peptide
QEERETKTPEC

SEQ ID NO: 2263 - protein, 11 aa, Artificial Sequence
  Synthetic Peptide
EERETKTPECP

SEQ ID NO: 2264 - protein, 11 aa, Artificial Sequence
  Synthetic Peptide
ERETKTPECPS

SEQ ID NO: 2265 - protein, 11 aa, Artificial Sequence
  Synthetic Peptide
RETKTPECPSH

SEQ ID NO: 2266 - protein, 11 aa, Artificial Sequence
  Synthetic Peptide
ETKTPECPSHT

SEQ ID NO: 2267 - protein, 11 aa, Artificial Sequence
  Synthetic Peptide
TKTPECPSHTQ

SEQ ID NO: 2268 - protein, 11 aa, Artificial Sequence
  Synthetic Peptide
KTPECPSHTQP

SEQ ID NO: 2269 - protein, 11 aa, Artificial Sequence
  Synthetic Peptide
TPECPSHTQPL

SEQ ID NO: 2270 - protein, 11 aa, Artificial Sequence
  Synthetic Peptide
PECPSHTQPLG

SEQ ID NO: 2271 - protein, 11 aa, Artificial Sequence
  Synthetic Peptide
ECPSHTQPLGV

SEQ ID NO: 2272 - protein, 11 aa, Artificial Sequence
  Synthetic Peptide
CPSHTQPLGVY

SEQ ID NO: 2273 - protein, 11 aa, Artificial Sequence
  Synthetic Peptide
PSHTQPLGVYL

SEQ ID NO: 2274 - protein, 11 aa, Artificial Sequence
  Synthetic Peptide
SHTQPLGVYLL

SEQ ID NO: 2275 - protein, 11 aa, Artificial Sequence
  Synthetic Peptide
HTQPLGVYLLT

SEQ ID NO: 2276 - protein, 11 aa, Artificial Sequence
  Synthetic Peptide
TQPLGVYLLTP

SEQ ID NO: 2277 - protein, 10 aa, Artificial Sequence
  Synthetic Peptide
RWPESPKAQA

SEQ ID NO: 2278 - protein, 10 aa, Artificial Sequence
  Synthetic Peptide
WPESPKAQAS

SEQ ID NO: 2279 - protein, 10 aa, Artificial Sequence
  Synthetic Peptide
PESPKAQASS

SEQ ID NO: 2280 - protein, 10 aa, Artificial Sequence
  Synthetic Peptide
ESPKAQASSV

SEQ ID NO: 2281 - protein, 10 aa, Artificial Sequence
  Synthetic Peptide
SPKAQASSVP

SEQ ID NO: 2282 - protein, 10 aa, Artificial Sequence
  Synthetic Peptide
PKAQASSVPT

SEQ ID NO: 2283 - protein, 10 aa, Artificial Sequence
  Synthetic Peptide
KAQASSVPTA

SEQ ID NO: 2284 - protein, 10 aa, Artificial Sequence
  Synthetic Peptide
AQASSVPTAQ

SEQ ID NO: 2285 - protein, 10 aa, Artificial Sequence
  Synthetic Peptide
QASSVPTAQP

SEQ ID NO: 2286 - protein, 10 aa, Artificial Sequence
  Synthetic Peptide
ASSVPTAQPQ

SEQ ID NO: 2287 - protein, 10 aa, Artificial Sequence
  Synthetic Peptide
SSVPTAQPQA

SEQ ID NO: 2288 - protein, 10 aa, Artificial Sequence
  Synthetic Peptide
SVPTAQPQAE

SEQ ID NO: 2289 - protein, 10 aa, Artificial Sequence
  Synthetic Peptide
VPTAQPQAEG

SEQ ID NO: 2290 - protein, 10 aa, Artificial Sequence
  Synthetic Peptide
PTAQPQAEGS

SEQ ID NO: 2291 - protein, 10 aa, Artificial Sequence
  Synthetic Peptide
TAQPQAEGSL

SEQ ID NO: 2292 - protein, 10 aa, Artificial Sequence
  Synthetic Peptide
AQPQAEGSLA

SEQ ID NO: 2293 - protein, 10 aa, Artificial Sequence
  Synthetic Peptide
QPQAEGSLAK

SEQ ID NO: 2294 - protein, 10 aa, Artificial Sequence
  Synthetic Peptide
PQAEGSLAKA

SEQ ID NO: 2295 - protein, 10 aa, Artificial Sequence
  Synthetic Peptide
QAEGSLAKAT

SEQ ID NO: 2296 - protein, 10 aa, Artificial Sequence
  Synthetic Peptide
AEGSLAKATT

SEQ ID NO: 2297 - protein, 10 aa, Artificial Sequence
  Synthetic Peptide
EGSLAKATTA

SEQ ID NO: 2298 - protein, 10 aa, Artificial Sequence
  Synthetic Peptide
GSLAKATTAP

SEQ ID NO: 2299 - protein, 10 aa, Artificial Sequence
  Synthetic Peptide
SLAKATTAPA

SEQ ID NO: 2300 - protein, 10 aa, Artificial Sequence
  Synthetic Peptide
LAKATTAPAT

SEQ ID NO: 2301 - protein, 10 aa, Artificial Sequence
  Synthetic Peptide
AKATTAPATT

SEQ ID NO: 2302 - protein, 10 aa, Artificial Sequence
  Synthetic Peptide
KATTAPATTR

SEQ ID NO: 2303 - protein, 10 aa, Artificial Sequence
  Synthetic Peptide
ATTAPATTRN

SEQ ID NO: 2304 - protein, 10 aa, Artificial Sequence
  Synthetic Peptide
TTAPATTRNT

SEQ ID NO: 2305 - protein, 10 aa, Artificial Sequence
  Synthetic Peptide
TAPATTRNTG

SEQ ID NO: 2306 - protein, 10 aa, Artificial Sequence
  Synthetic Peptide
APATTRNTGR

SEQ ID NO: 2307 - protein, 10 aa, Artificial Sequence
  Synthetic Peptide
PATTRNTGRG

SEQ ID NO: 2308 - protein, 10 aa, Artificial Sequence
  Synthetic Peptide
ATTRNTGRGG

SEQ ID NO: 2309 - protein, 10 aa, Artificial Sequence
  Synthetic Peptide
TTRNTGRGGE

SEQ ID NO: 2310 - protein, 10 aa, Artificial Sequence
  Synthetic Peptide
TRNTGRGGEE

SEQ ID NO: 2311 - protein, 10 aa, Artificial Sequence
  Synthetic Peptide
RNTGRGGEEK

SEQ ID NO: 2312 - protein, 10 aa, Artificial Sequence
  Synthetic Peptide
NTGRGGEEKK

SEQ ID NO: 2313 - protein, 10 aa, Artificial Sequence
  Synthetic Peptide
TGRGGEEKKK

SEQ ID NO: 2314 - protein, 10 aa, Artificial Sequence
  Synthetic Peptide
GRGGEEKKKE

SEQ ID NO: 2315 - protein, 10 aa, Artificial Sequence
  Synthetic Peptide
RGGEEKKKEK

SEQ ID NO: 2316 - protein, 10 aa, Artificial Sequence
  Synthetic Peptide
GGEEKKKEKE

SEQ ID NO: 2317 - protein, 10 aa, Artificial Sequence
  Synthetic Peptide
GEEKKKEKEK

SEQ ID NO: 2318 - protein, 10 aa, Artificial Sequence
  Synthetic Peptide
EEKKKEKEKE

SEQ ID NO: 2319 - protein, 10 aa, Artificial Sequence
  Synthetic Peptide
EKKKEKEKEE

SEQ ID NO: 2320 - protein, 10 aa, Artificial Sequence
  Synthetic Peptide
KKKEKEKEEQ

SEQ ID NO: 2321 - protein, 10 aa, Artificial Sequence
  Synthetic Peptide
KKEKEKEEQE

SEQ ID NO: 2322 - protein, 10 aa, Artificial Sequence
  Synthetic Peptide
KEKEKEEQEE

SEQ ID NO: 2323 - protein, 10 aa, Artificial Sequence
  Synthetic Peptide
EKEKEEQEER

SEQ ID NO: 2324 - protein, 10 aa, Artificial Sequence
  Synthetic Peptide
KEKEEQEERE

SEQ ID NO: 2325 - protein, 10 aa, Artificial Sequence
  Synthetic Peptide
EKEEQEERET

SEQ ID NO: 2326 - protein, 10 aa, Artificial Sequence
  Synthetic Peptide
KEEQEERETK

SEQ ID NO: 2327 - protein, 10 aa, Artificial Sequence
  Synthetic Peptide
EEQEERETKT

SEQ ID NO: 2328 - protein, 10 aa, Artificial Sequence
  Synthetic Peptide
EQEERETKTP

SEQ ID NO: 2329 - protein, 10 aa, Artificial Sequence
  Synthetic Peptide
QEERETKTPE

SEQ ID NO: 2330 - protein, 10 aa, Artificial Sequence
  Synthetic Peptide
EERETKTPEC

SEQ ID NO: 2331 - protein, 10 aa, Artificial Sequence
  Synthetic Peptide
ERETKTPECP

SEQ ID NO: 2332 - protein, 10 aa, Artificial Sequence
  Synthetic Peptide
RETKTPECPS

SEQ ID NO: 2333 - protein, 10 aa, Artificial Sequence
  Synthetic Peptide
ETKTPECPSH

SEQ ID NO: 2334 - protein, 10 aa, Artificial Sequence
  Synthetic Peptide
TKTPECPSHT

SEQ ID NO: 2335 - protein, 10 aa, Artificial Sequence
  Synthetic Peptide
KTPECPSHTQ

SEQ ID NO: 2336 - protein, 10 aa, Artificial Sequence
  Synthetic Peptide
TPECPSHTQP

SEQ ID NO: 2337 - protein, 10 aa, Artificial Sequence
  Synthetic Peptide
PECPSHTQPL

SEQ ID NO: 2338 - protein, 10 aa, Artificial Sequence
  Synthetic Peptide
ECPSHTQPLG

SEQ ID NO: 2339 - protein, 10 aa, Artificial Sequence
  Synthetic Peptide
CPSHTQPLGV

SEQ ID NO: 2340 - protein, 10 aa, Artificial Sequence
  Synthetic Peptide
PSHTQPLGVY

SEQ ID NO: 2341 - protein, 10 aa, Artificial Sequence
  Synthetic Peptide
SHTQPLGVYL

SEQ ID NO: 2342 - protein, 10 aa, Artificial Sequence
  Synthetic Peptide
HTQPLGVYLL

SEQ ID NO: 2343 - protein, 10 aa, Artificial Sequence
  Synthetic Peptide
TQPLGVYLLT

SEQ ID NO: 2344 - protein, 10 aa, Artificial Sequence
  Synthetic Peptide
QPLGVYLLTP

SEQ ID NO: 2345 - protein, 9 aa, Artificial Sequence
  Synthetic Peptide
RWPESPKAQ

SEQ ID NO: 2346 - protein, 9 aa, Artificial Sequence
  Synthetic Peptide
WPESPKAQA

SEQ ID NO: 2347 - protein, 9 aa, Artificial Sequence
  Synthetic Peptide
PESPKAQAS

SEQ ID NO: 2348 - protein, 9 aa, Artificial Sequence
  Synthetic Peptide
ESPKAQASS

SEQ ID NO: 2349 - protein, 9 aa, Artificial Sequence
  Synthetic Peptide
SPKAQASSV

SEQ ID NO: 2350 - protein, 9 aa, Artificial Sequence
  Synthetic Peptide
PKAQASSVP

SEQ ID NO: 2351 - protein, 9 aa, Artificial Sequence
  Synthetic Peptide
KAQASSVPT

SEQ ID NO: 2352 - protein, 9 aa, Artificial Sequence
  Synthetic Peptide
AQASSVPTA

SEQ ID NO: 2353 - protein, 9 aa, Artificial Sequence
  Synthetic Peptide
QASSVPTAQ

SEQ ID NO: 2354 - protein, 9 aa, Artificial Sequence
  Synthetic Peptide
ASSVPTAQP

SEQ ID NO: 2355 - protein, 9 aa, Artificial Sequence
  Synthetic Peptide
SSVPTAQPQ

SEQ ID NO: 2356 - protein, 9 aa, Artificial Sequence
  Synthetic Peptide
SVPTAQPQA

SEQ ID NO: 2357 - protein, 9 aa, Artificial Sequence
  Synthetic Peptide
VPTAQPQAE

SEQ ID NO: 2358 - protein, 9 aa, Artificial Sequence
  Synthetic Peptide
PTAQPQAEG

SEQ ID NO: 2359 - protein, 9 aa, Artificial Sequence
  Synthetic Peptide
TAQPQAEGS

SEQ ID NO: 2360 - protein, 9 aa, Artificial Sequence
  Synthetic Peptide
AQPQAEGSL

SEQ ID NO: 2361 - protein, 9 aa, Artificial Sequence
  Synthetic Peptide
QPQAEGSLA

SEQ ID NO: 2362 - protein, 9 aa, Artificial Sequence
  Synthetic Peptide
PQAEGSLAK

SEQ ID NO: 2363 - protein, 9 aa, Artificial Sequence
  Synthetic Peptide
QAEGSLAKA

SEQ ID NO: 2364 - protein, 9 aa, Artificial Sequence
  Synthetic Peptide
AEGSLAKAT

SEQ ID NO: 2365 - protein, 9 aa, Artificial Sequence
  Synthetic Peptide
EGSLAKATT

SEQ ID NO: 2366 - protein, 9 aa, Artificial Sequence
  Synthetic Peptide
GSLAKATTA

SEQ ID NO: 2367 - protein, 9 aa, Artificial Sequence
  Synthetic Peptide
SLAKATTAP

SEQ ID NO: 2368 - protein, 9 aa, Artificial Sequence
  Synthetic Peptide
LAKATTAPA

SEQ ID NO: 2369 - protein, 9 aa, Artificial Sequence
  Synthetic Peptide
AKATTAPAT

SEQ ID NO: 2370 - protein, 9 aa, Artificial Sequence
  Synthetic Peptide
KATTAPATT

SEQ ID NO: 2371 - protein, 9 aa, Artificial Sequence
  Synthetic Peptide
ATTAPATTR

SEQ ID NO: 2372 - protein, 9 aa, Artificial Sequence
  Synthetic Peptide
TTAPATTRN

SEQ ID NO: 2373 - protein, 9 aa, Artificial Sequence
  Synthetic Peptide
TAPATTRNT

SEQ ID NO: 2374 - protein, 9 aa, Artificial Sequence
  Synthetic Peptide
APATTRNTG

SEQ ID NO: 2375 - protein, 9 aa, Artificial Sequence
  Synthetic Peptide
PATTRNTGR

SEQ ID NO: 2376 - protein, 9 aa, Artificial Sequence
  Synthetic Peptide
ATTRNTGRG

SEQ ID NO: 2377 - protein, 9 aa, Artificial Sequence
  Synthetic Peptide
TTRNTGRGG

SEQ ID NO: 2378 - protein, 9 aa, Artificial Sequence
  Synthetic Peptide
TRNTGRGGE

SEQ ID NO: 2379 - protein, 9 aa, Artificial Sequence
  Synthetic Peptide
RNTGRGGEE

SEQ ID NO: 2380 - protein, 9 aa, Artificial Sequence
  Synthetic Peptide
NTGRGGEEK

SEQ ID NO: 2381 - protein, 9 aa, Artificial Sequence
  Synthetic Peptide
TGRGGEEKK

SEQ ID NO: 2382 - protein, 9 aa, Artificial Sequence
  Synthetic Peptide
GRGGEEKKK

SEQ ID NO: 2383 - protein, 9 aa, Artificial Sequence
  Synthetic Peptide
RGGEEKKKE

SEQ ID NO: 2384 - protein, 9 aa, Artificial Sequence
  Synthetic Peptide
GGEEKKKEK

SEQ ID NO: 2385 - protein, 9 aa, Artificial Sequence
  Synthetic Peptide
GEEKKKEKE

SEQ ID NO: 2386 - protein, 9 aa, Artificial Sequence
  Synthetic Peptide
EEKKKEKEK

SEQ ID NO: 2387 - protein, 9 aa, Artificial Sequence
  Synthetic Peptide
EKKKEKEKE

SEQ ID NO: 2388 - protein, 9 aa, Artificial Sequence
  Synthetic Peptide
KKKEKEKEE

SEQ ID NO: 2389 - protein, 9 aa, Artificial Sequence
  Synthetic Peptide
KKEKEKEEQ

SEQ ID NO: 2390 - protein, 9 aa, Artificial Sequence
  Synthetic Peptide
KEKEKEEQE

SEQ ID NO: 2391 - protein, 9 aa, Artificial Sequence
  Synthetic Peptide
EKEKEEQEE

SEQ ID NO: 2392 - protein, 9 aa, Artificial Sequence
  Synthetic Peptide
KEKEEQEER

SEQ ID NO: 2393 - protein, 9 aa, Artificial Sequence
  Synthetic Peptide
EKEEQEERE

SEQ ID NO: 2394 - protein, 9 aa, Artificial Sequence
  Synthetic Peptide
KEEQEERET

SEQ ID NO: 2395 - protein, 9 aa, Artificial Sequence
  Synthetic Peptide
EEQEERETK

SEQ ID NO: 2396 - protein, 9 aa, Artificial Sequence
  Synthetic Peptide
EQEERETKT

SEQ ID NO: 2397 - protein, 9 aa, Artificial Sequence
  Synthetic Peptide
QEERETKTP

SEQ ID NO: 2398 - protein, 9 aa, Artificial Sequence
  Synthetic Peptide
EERETKTPE

SEQ ID NO: 2399 - protein, 9 aa, Artificial Sequence
  Synthetic Peptide
ERETKTPEC

SEQ ID NO: 2400 - protein, 9 aa, Artificial Sequence
  Synthetic Peptide
RETKTPECP

SEQ ID NO: 2401 - protein, 9 aa, Artificial Sequence
  Synthetic Peptide
ETKTPECPS

SEQ ID NO: 2402 - protein, 9 aa, Artificial Sequence
  Synthetic Peptide
TKTPECPSH

SEQ ID NO: 2403 - protein, 9 aa, Artificial Sequence
  Synthetic Peptide
KTPECPSHT

SEQ ID NO: 2404 - protein, 9 aa, Artificial Sequence
  Synthetic Peptide
TPECPSHTQ

SEQ ID NO: 2405 - protein, 9 aa, Artificial Sequence
  Synthetic Peptide
PECPSHTQP

SEQ ID NO: 2406 - protein, 9 aa, Artificial Sequence
  Synthetic Peptide
ECPSHTQPL

SEQ ID NO: 2407 - protein, 9 aa, Artificial Sequence
  Synthetic Peptide
CPSHTQPLG

SEQ ID NO: 2408 - protein, 9 aa, Artificial Sequence
  Synthetic Peptide
PSHTQPLGV

SEQ ID NO: 2409 - protein, 9 aa, Artificial Sequence
  Synthetic Peptide
SHTQPLGVY

SEQ ID NO: 2410 - protein, 9 aa, Artificial Sequence
  Synthetic Peptide
HTQPLGVYL

SEQ ID NO: 2411 - protein, 9 aa, Artificial Sequence
  Synthetic Peptide
TQPLGVYLL

SEQ ID NO: 2412 - protein, 9 aa, Artificial Sequence
  Synthetic Peptide
QPLGVYLLT

SEQ ID NO: 2413 - protein, 9 aa, Artificial Sequence
  Synthetic Peptide
PLGVYLLTP

SEQ ID NO: 2414 - protein, 8 aa, Artificial Sequence
  Synthetic Peptide
RWPESPKA

SEQ ID NO: 2415 - protein, 8 aa, Artificial Sequence
  Synthetic Peptide
WPESPKAQ

SEQ ID NO: 2416 - protein, 8 aa, Artificial Sequence
  Synthetic Peptide
PESPKAQA

SEQ ID NO: 2417 - protein, 8 aa, Artificial Sequence
  Synthetic Peptide
ESPKAQAS

SEQ ID NO: 2418 - protein, 8 aa, Artificial Sequence
  Synthetic Peptide
SPKAQASS

SEQ ID NO: 2419 - protein, 8 aa, Artificial Sequence
  Synthetic Peptide
PKAQASSV

SEQ ID NO: 2420 - protein, 8 aa, Artificial Sequence
  Synthetic Peptide
KAQASSVP

SEQ ID NO: 2421 - protein, 8 aa, Artificial Sequence
  Synthetic Peptide
AQASSVPT

SEQ ID NO: 2422 - protein, 8 aa, Artificial Sequence
  Synthetic Peptide
QASSVPTA

SEQ ID NO: 2423 - protein, 8 aa, Artificial Sequence
  Synthetic Peptide
ASSVPTAQ

SEQ ID NO: 2424 - protein, 8 aa, Artificial Sequence
  Synthetic Peptide
SSVPTAQP

SEQ ID NO: 2425 - protein, 8 aa, Artificial Sequence
  Synthetic Peptide
SVPTAQPQ

SEQ ID NO: 2426 - protein, 8 aa, Artificial Sequence
  Synthetic Peptide
VPTAQPQA

SEQ ID NO: 2427 - protein, 8 aa, Artificial Sequence
  Synthetic Peptide
PTAQPQAE

SEQ ID NO: 2428 - protein, 8 aa, Artificial Sequence
  Synthetic Peptide
TAQPQAEG

SEQ ID NO: 2429 - protein, 8 aa, Artificial Sequence
  Synthetic Peptide
AQPQAEGS

SEQ ID NO: 2430 - protein, 8 aa, Artificial Sequence
  Synthetic Peptide
QPQAEGSL

SEQ ID NO: 2431 - protein, 8 aa, Artificial Sequence
  Synthetic Peptide
PQAEGSLA

SEQ ID NO: 2432 - protein, 8 aa, Artificial Sequence
  Synthetic Peptide
QAEGSLAK

SEQ ID NO: 2433 - protein, 8 aa, Artificial Sequence
  Synthetic Peptide
AEGSLAKA

SEQ ID NO: 2434 - protein, 8 aa, Artificial Sequence
  Synthetic Peptide
EGSLAKAT

SEQ ID NO: 2435 - protein, 8 aa, Artificial Sequence
  Synthetic Peptide
GSLAKATT

SEQ ID NO: 2436 - protein, 8 aa, Artificial Sequence
  Synthetic Peptide
SLAKATTA

SEQ ID NO: 2437 - protein, 8 aa, Artificial Sequence
  Synthetic Peptide
LAKATTAP

SEQ ID NO: 2438 - protein, 8 aa, Artificial Sequence
  Synthetic Peptide
AKATTAPA

SEQ ID NO: 2439 - protein, 8 aa, Artificial Sequence
  Synthetic Peptide
KATTAPAT

SEQ ID NO: 2440 - protein, 8 aa, Artificial Sequence
  Synthetic Peptide
ATTAPATT

SEQ ID NO: 2441 - protein, 8 aa, Artificial Sequence
  Synthetic Peptide
TTAPATTR

SEQ ID NO: 2442 - protein, 8 aa, Artificial Sequence
  Synthetic Peptide
TAPATTRN

SEQ ID NO: 2443 - protein, 8 aa, Artificial Sequence
  Synthetic Peptide
APATTRNT

SEQ ID NO: 2444 - protein, 8 aa, Artificial Sequence
  Synthetic Peptide
PATTRNTG

SEQ ID NO: 2445 - protein, 8 aa, Artificial Sequence
  Synthetic Peptide
ATTRNTGR

SEQ ID NO: 2446 - protein, 8 aa, Artificial Sequence
  Synthetic Peptide
TTRNTGRG

SEQ ID NO: 2447 - protein, 8 aa, Artificial Sequence
  Synthetic Peptide
TRNTGRGG

SEQ ID NO: 2448 - protein, 8 aa, Artificial Sequence
  Synthetic Peptide
RNTGRGGE

SEQ ID NO: 2449 - protein, 8 aa, Artificial Sequence
  Synthetic Peptide
NTGRGGEE

SEQ ID NO: 2450 - protein, 8 aa, Artificial Sequence
  Synthetic Peptide
TGRGGEEK

SEQ ID NO: 2451 - protein, 8 aa, Artificial Sequence
  Synthetic Peptide
GRGGEEKK

SEQ ID NO: 2452 - protein, 8 aa, Artificial Sequence
  Synthetic Peptide
RGGEEKKK

SEQ ID NO: 2453 - protein, 8 aa, Artificial Sequence
  Synthetic Peptide
GGEEKKKE

SEQ ID NO: 2454 - protein, 8 aa, Artificial Sequence
  Synthetic Peptide
GEEKKKEK

SEQ ID NO: 2455 - protein, 8 aa, Artificial Sequence
  Synthetic Peptide
EEKKKEKE

SEQ ID NO: 2456 - protein, 8 aa, Artificial Sequence
  Synthetic Peptide
EKKKEKEK

SEQ ID NO: 2457 - protein, 8 aa, Artificial Sequence
  Synthetic Peptide
KKKEKEKE

SEQ ID NO: 2458 - protein, 8 aa, Artificial Sequence
  Synthetic Peptide
KKEKEKEE

SEQ ID NO: 2459 - protein, 8 aa, Artificial Sequence
  Synthetic Peptide
KEKEKEEQ

SEQ ID NO: 2460 - protein, 8 aa, Artificial Sequence
  Synthetic Peptide
EKEKEEQE

SEQ ID NO: 2461 - protein, 8 aa, Artificial Sequence
  Synthetic Peptide
KEKEEQEE

SEQ ID NO: 2462 - protein, 8 aa, Artificial Sequence
  Synthetic Peptide
EKEEQEER

SEQ ID NO: 2463 - protein, 8 aa, Artificial Sequence
  Synthetic Peptide
KEEQEERE

SEQ ID NO: 2464 - protein, 8 aa, Artificial Sequence
  Synthetic Peptide
EEQEERET

SEQ ID NO: 2465 - protein, 8 aa, Artificial Sequence
  Synthetic Peptide
EQEERETK

SEQ ID NO: 2466 - protein, 8 aa, Artificial Sequence
  Synthetic Peptide
QEERETKT

SEQ ID NO: 2467 - protein, 8 aa, Artificial Sequence
  Synthetic Peptide
EERETKTP

SEQ ID NO: 2468 - protein, 8 aa, Artificial Sequence
  Synthetic Peptide
ERETKTPE

SEQ ID NO: 2469 - protein, 8 aa, Artificial Sequence
  Synthetic Peptide
RETKTPEC

SEQ ID NO: 2470 - protein, 8 aa, Artificial Sequence
  Synthetic Peptide
ETKTPECP

SEQ ID NO: 2471 - protein, 8 aa, Artificial Sequence
  Synthetic Peptide
TKTPECPS

SEQ ID NO: 2472 - protein, 8 aa, Artificial Sequence
  Synthetic Peptide
KTPECPSH

SEQ ID NO: 2473 - protein, 8 aa, Artificial Sequence
  Synthetic Peptide
TPECPSHT

SEQ ID NO: 2474 - protein, 8 aa, Artificial Sequence
  Synthetic Peptide
PECPSHTQ

SEQ ID NO: 2475 - protein, 8 aa, Artificial Sequence
  Synthetic Peptide
ECPSHTQP

SEQ ID NO: 2476 - protein, 8 aa, Artificial Sequence
  Synthetic Peptide
CPSHTQPL

SEQ ID NO: 2477 - protein, 8 aa, Artificial Sequence
  Synthetic Peptide
PSHTQPLG

SEQ ID NO: 2478 - protein, 8 aa, Artificial Sequence
  Synthetic Peptide
SHTQPLGV

SEQ ID NO: 2479 - protein, 8 aa, Artificial Sequence
  Synthetic Peptide
HTQPLGVY

SEQ ID NO: 2480 - protein, 8 aa, Artificial Sequence
  Synthetic Peptide
TQPLGVYL

SEQ ID NO: 2481 - protein, 8 aa, Artificial Sequence
  Synthetic Peptide
QPLGVYLL

SEQ ID NO: 2482 - protein, 8 aa, Artificial Sequence
  Synthetic Peptide
PLGVYLLT

SEQ ID NO: 2483 - protein, 8 aa, Artificial Sequence
  Synthetic Peptide
LGVYLLTP

SEQ ID NO: 2484 - protein, 7 aa, Artificial Sequence
  Synthetic Peptide
RWPESPK

SEQ ID NO: 2485 - protein, 7 aa, Artificial Sequence
  Synthetic Peptide
WPESPKA

SEQ ID NO: 2486 - protein, 7 aa, Artificial Sequence
  Synthetic Peptide
PESPKAQ

SEQ ID NO: 2487 - protein, 7 aa, Artificial Sequence
  Synthetic Peptide
ESPKAQA

SEQ ID NO: 2488 - protein, 7 aa, Artificial Sequence
  Synthetic Peptide
SPKAQAS

SEQ ID NO: 2489 - protein, 7 aa, Artificial Sequence
  Synthetic Peptide
PKAQASS

SEQ ID NO: 2490 - protein, 7 aa, Artificial Sequence
  Synthetic Peptide
KAQASSV

SEQ ID NO: 2491 - protein, 7 aa, Artificial Sequence
  Synthetic Peptide
AQASSVP

SEQ ID NO: 2492 - protein, 7 aa, Artificial Sequence
  Synthetic Peptide
QASSVPT

SEQ ID NO: 2493 - protein, 7 aa, Artificial Sequence
  Synthetic Peptide
ASSVPTA

SEQ ID NO: 2494 - protein, 7 aa, Artificial Sequence
  Synthetic Peptide
SSVPTAQ

SEQ ID NO: 2495 - protein, 7 aa, Artificial Sequence
  Synthetic Peptide
SVPTAQP

SEQ ID NO: 2496 - protein, 7 aa, Artificial Sequence
  Synthetic Peptide
VPTAQPQ

SEQ ID NO: 2497 - protein, 7 aa, Artificial Sequence
  Synthetic Peptide
PTAQPQA

SEQ ID NO: 2498 - protein, 7 aa, Artificial Sequence
  Synthetic Peptide
TAQPQAE

SEQ ID NO: 2499 - protein, 7 aa, Artificial Sequence
  Synthetic Peptide
AQPQAEG

SEQ ID NO: 2500 - protein, 7 aa, Artificial Sequence
  Synthetic Peptide
QPQAEGS

SEQ ID NO: 2501 - protein, 7 aa, Artificial Sequence
  Synthetic Peptide
PQAEGSL

SEQ ID NO: 2502 - protein, 7 aa, Artificial Sequence
  Synthetic Peptide
QAEGSLA

SEQ ID NO: 2503 - protein, 7 aa, Artificial Sequence
  Synthetic Peptide
AEGSLAK

SEQ ID NO: 2504 - protein, 7 aa, Artificial Sequence
  Synthetic Peptide
EGSLAKA

SEQ ID NO: 2505 - protein, 7 aa, Artificial Sequence
  Synthetic Peptide
GSLAKAT

SEQ ID NO: 2506 - protein, 7 aa, Artificial Sequence
  Synthetic Peptide
SLAKATT

SEQ ID NO: 2507 - protein, 7 aa, Artificial Sequence
  Synthetic Peptide
LAKATTA

SEQ ID NO: 2508 - protein, 7 aa, Artificial Sequence
  Synthetic Peptide
AKATTAP

SEQ ID NO: 2509 - protein, 7 aa, Artificial Sequence
  Synthetic Peptide
KATTAPA

SEQ ID NO: 2510 - protein, 7 aa, Artificial Sequence
  Synthetic Peptide
ATTAPAT

SEQ ID NO: 2511 - protein, 7 aa, Artificial Sequence
  Synthetic Peptide
TTAPATT

SEQ ID NO: 2512 - protein, 7 aa, Artificial Sequence
  Synthetic Peptide
TAPATTR

SEQ ID NO: 2513 - protein, 7 aa, Artificial Sequence
  Synthetic Peptide
APATTRN

SEQ ID NO: 2514 - protein, 7 aa, Artificial Sequence
  Synthetic Peptide
PATTRNT

SEQ ID NO: 2515 - protein, 7 aa, Artificial Sequence
  Synthetic Peptide
ATTRNTG

SEQ ID NO: 2516 - protein, 7 aa, Artificial Sequence
  Synthetic Peptide
TTRNTGR

SEQ ID NO: 2517 - protein, 7 aa, Artificial Sequence
  Synthetic Peptide
TRNTGRG

SEQ ID NO: 2518 - protein, 7 aa, Artificial Sequence
  Synthetic Peptide
RNTGRGG

SEQ ID NO: 2519 - protein, 7 aa, Artificial Sequence
  Synthetic Peptide
NTGRGGE

SEQ ID NO: 2520 - protein, 7 aa, Artificial Sequence
  Synthetic Peptide
TGRGGEE

SEQ ID NO: 2521 - protein, 7 aa, Artificial Sequence
  Synthetic Peptide
GRGGEEK

SEQ ID NO: 2522 - protein, 7 aa, Artificial Sequence
  Synthetic Peptide
RGGEEKK

SEQ ID NO: 2523 - protein, 7 aa, Artificial Sequence
  Synthetic Peptide
GGEEKKK

SEQ ID NO: 2524 - protein, 7 aa, Artificial Sequence
  Synthetic Peptide
GEEKKKE

SEQ ID NO: 2525 - protein, 7 aa, Artificial Sequence
  Synthetic Peptide
EEKKKEK

SEQ ID NO: 2526 - protein, 7 aa, Artificial Sequence
  Synthetic Peptide
EKKKEKE

SEQ ID NO: 2527 - protein, 7 aa, Artificial Sequence
  Synthetic Peptide
KKKEKEK

SEQ ID NO: 2528 - protein, 7 aa, Artificial Sequence
  Synthetic Peptide
KKEKEKE

SEQ ID NO: 2529 - protein, 7 aa, Artificial Sequence
  Synthetic Peptide
KEKEKEE

SEQ ID NO: 2530 - protein, 7 aa, Artificial Sequence
  Synthetic Peptide
EKEKEEQ

SEQ ID NO: 2531 - protein, 7 aa, Artificial Sequence
  Synthetic Peptide
KEKEEQE

SEQ ID NO: 2532 - protein, 7 aa, Artificial Sequence
  Synthetic Peptide
EKEEQEE

SEQ ID NO: 2533 - protein, 7 aa, Artificial Sequence
  Synthetic Peptide
KEEQEER

SEQ ID NO: 2534 - protein, 7 aa, Artificial Sequence
  Synthetic Peptide
EEQEERE

SEQ ID NO: 2535 - protein, 7 aa, Artificial Sequence
  Synthetic Peptide
EQEERET

SEQ ID NO: 2536 - protein, 7 aa, Artificial Sequence
  Synthetic Peptide
QEERETK

SEQ ID NO: 2537 - protein, 7 aa, Artificial Sequence
  Synthetic Peptide
EERETKT

SEQ ID NO: 2538 - protein, 7 aa, Artificial Sequence
  Synthetic Peptide
ERETKTP

SEQ ID NO: 2539 - protein, 7 aa, Artificial Sequence
  Synthetic Peptide
RETKTPR

SEQ ID NO: 2540 - protein, 7 aa, Artificial Sequence
  Synthetic Peptide
ETKTPRE

SEQ ID NO: 2541 - protein, 7 aa, Artificial Sequence
  Synthetic Peptide
TKTPRET

SEQ ID NO: 2542 - protein, 7 aa, Artificial Sequence
  Synthetic Peptide
KTPRETK

SEQ ID NO: 2543 - protein, 7 aa, Artificial Sequence
  Synthetic Peptide
TPRETKT

SEQ ID NO: 2544 - protein, 7 aa, Artificial Sequence
  Synthetic Peptide
PRETKTP

SEQ ID NO: 2545 - protein, 7 aa, Artificial Sequence
  Synthetic Peptide
RETKTPE

SEQ ID NO: 2546 - protein, 7 aa, Artificial Sequence
  Synthetic Peptide
ETKTPEC

SEQ ID NO: 2547 - protein, 7 aa, Artificial Sequence
  Synthetic Peptide
TKTPECP

SEQ ID NO: 2548 - protein, 7 aa, Artificial Sequence
  Synthetic Peptide
KTPECPS

SEQ ID NO: 2549 - protein, 7 aa, Artificial Sequence
  Synthetic Peptide
TPECPSH

SEQ ID NO: 2550 - protein, 7 aa, Artificial Sequence
  Synthetic Peptide
PECPSHT

SEQ ID NO: 2551 - protein, 7 aa, Artificial Sequence
  Synthetic Peptide
ECPSHTQ

SEQ ID NO: 2552 - protein, 7 aa, Artificial Sequence
  Synthetic Peptide
CPSHTQP

SEQ ID NO: 2553 - protein, 7 aa, Artificial Sequence
  Synthetic Peptide
PSHTQPL

SEQ ID NO: 2554 - protein, 7 aa, Artificial Sequence
  Synthetic Peptide
SHTQPLG

SEQ ID NO: 2555 - protein, 7 aa, Artificial Sequence
  Synthetic Peptide
HTQPLGV

SEQ ID NO: 2556 - protein, 7 aa, Artificial Sequence
  Synthetic Peptide
TQPLGVY

SEQ ID NO: 2557 - protein, 7 aa, Artificial Sequence
  Synthetic Peptide
QPLGVYL

SEQ ID NO: 2558 - protein, 7 aa, Artificial Sequence
  Synthetic Peptide
PLGVYLL

SEQ ID NO: 2559 - protein, 7 aa, Artificial Sequence
  Synthetic Peptide
LGVYLLT

SEQ ID NO: 2560 - protein, 23 aa, Artificial Sequence
  Synthetic Peptide
PVPSTPPTPSPSTPPTPSPSCCH

SEQ ID NO: 2561 - protein, 22 aa, Artificial Sequence
  Synthetic Peptide
PVPSTPPTPSPSTPPTPSPSCC

SEQ ID NO: 2562 - protein, 22 aa, Artificial Sequence
  Synthetic Peptide
VPSTPPTPSPSTPPTPSPSCCH

SEQ ID NO: 2563 - protein, 21 aa, Artificial Sequence
  Synthetic Peptide
PVPSTPPTPSPSTPPTPSPSC

SEQ ID NO: 2564 - protein, 21 aa, Artificial Sequence
  Synthetic Peptide
VPSTPPTPSPSTPPTPSPSCC

SEQ ID NO: 2565 - protein, 21 aa, Artificial Sequence
  Synthetic Peptide
PSTPPTPSPSTPPTPSPSCCH

SEQ ID NO: 2566 - protein, 20 aa, Artificial Sequence
  Synthetic Peptide
PVPSTPPTPSPSTPPTPSPS

SEQ ID NO: 2567 - protein, 20 aa, Artificial Sequence
  Synthetic Peptide
VPSTPPTPSPSTPPTPSPSC

SEQ ID NO: 2568 - protein, 20 aa, Artificial Sequence
  Synthetic Peptide
PSTPPTPSPSTPPTPSPSCC

SEQ ID NO: 2569 - protein, 20 aa, Artificial Sequence
  Synthetic Peptide
STPPTPSPSTPPTPSPSCCH

SEQ ID NO: 2570 - protein, 19 aa, Artificial Sequence
  Synthetic Peptide
PVPSTPPTPSPSTPPTPSP

SEQ ID NO: 2571 - protein, 19 aa, Artificial Sequence
  Synthetic Peptide
VPSTPPTPSPSTPPTPSPS

SEQ ID NO: 2572 - protein, 19 aa, Artificial Sequence
  Synthetic Peptide
PSTPPTPSPSTPPTPSPSC

SEQ ID NO: 2573 - protein, 19 aa, Artificial Sequence
  Synthetic Peptide
STPPTPSPSTPPTPSPSCC

SEQ ID NO: 2574 - protein, 19 aa, Artificial Sequence
  Synthetic Peptide
TPPTPSPSTPPTPSPSCCH

SEQ ID NO: 2575 - protein, 18 aa, Artificial Sequence
  Synthetic Peptide
PVPSTPPTPSPSTPPTPS

SEQ ID NO: 2576 - protein, 18 aa, Artificial Sequence
  Synthetic Peptide
VPSTPPTPSPSTPPTPSP

SEQ ID NO: 2577 - protein, 18 aa, Artificial Sequence
  Synthetic Peptide
PSTPPTPSPSTPPTPSPS

SEQ ID NO: 2578 - protein, 18 aa, Artificial Sequence
  Synthetic Peptide
STPPTPSPSTPPTPSPSC

SEQ ID NO: 2579 - protein, 18 aa, Artificial Sequence
  Synthetic Peptide
TPPTPSPSTPPTPSPSCC

SEQ ID NO: 2580 - protein, 18 aa, Artificial Sequence
  Synthetic Peptide
PPTPSPSTPPTPSPSCCH

SEQ ID NO: 2581 - protein, 17 aa, Artificial Sequence
  Synthetic Peptide
PVPSTPPTPSPSTPPTP

SEQ ID NO: 2582 - protein, 17 aa, Artificial Sequence
  Synthetic Peptide
VPSTPPTPSPSTPPTPS

SEQ ID NO: 2583 - protein, 17 aa, Artificial Sequence
  Synthetic Peptide
PSTPPTPSPSTPPTPSP

SEQ ID NO: 2584 - protein, 17 aa, Artificial Sequence
  Synthetic Peptide
STPPTPSPSTPPTPSPS

SEQ ID NO: 2585 - protein, 17 aa, Artificial Sequence
  Synthetic Peptide
TPPTPSPSTPPTPSPSC

SEQ ID NO: 2586 - protein, 17 aa, Artificial Sequence
  Synthetic Peptide
PPTPSPSTPPTPSPSCC

SEQ ID NO: 2587 - protein, 17 aa, Artificial Sequence
  Synthetic Peptide
PTPSPSTPPTPSPSCCH

SEQ ID NO: 2588 - protein, 16 aa, Artificial Sequence
  Synthetic Peptide
PVPSTPPTPSPSTPPT

SEQ ID NO: 2589 - protein, 16 aa, Artificial Sequence
  Synthetic Peptide
VPSTPPTPSPSTPPTP

SEQ ID NO: 2590 - protein, 16 aa, Artificial Sequence
  Synthetic Peptide
PSTPPTPSPSTPPTPS

SEQ ID NO: 2591 - protein, 16 aa, Artificial Sequence
  Synthetic Peptide
STPPTPSPSTPPTPSP

SEQ ID NO: 2592 - protein, 16 aa, Artificial Sequence
  Synthetic Peptide
TPPTPSPSTPPTPSPS

SEQ ID NO: 2593 - protein, 16 aa, Artificial Sequence
  Synthetic Peptide
PPTPSPSTPPTPSPSC

SEQ ID NO: 2594 - protein, 16 aa, Artificial Sequence
  Synthetic Peptide
PTPSPSTPPTPSPSCC

SEQ ID NO: 2595 - protein, 16 aa, Artificial Sequence
  Synthetic Peptide
TPSPSTPPTPSPSCCH

SEQ ID NO: 2596 - protein, 15 aa, Artificial Sequence
  Synthetic Peptide
PVPSTPPTPSPSTPP

SEQ ID NO: 2597 - protein, 15 aa, Artificial Sequence
  Synthetic Peptide
VPSTPPTPSPSTPPT

SEQ ID NO: 2598 - protein, 15 aa, Artificial Sequence
  Synthetic Peptide
PSTPPTPSPSTPPTP

SEQ ID NO: 2599 - protein, 15 aa, Artificial Sequence
  Synthetic Peptide
STPPTPSPSTPPTPS

SEQ ID NO: 2600 - protein, 15 aa, Artificial Sequence
  Synthetic Peptide
TPPTPSPSTPPTPSP

SEQ ID NO: 2601 - protein, 15 aa, Artificial Sequence
  Synthetic Peptide
PPTPSPSTPPTPSPS

SEQ ID NO: 2602 - protein, 15 aa, Artificial Sequence
  Synthetic Peptide
PTPSPSTPPTPSPSC

SEQ ID NO: 2603 - protein, 15 aa, Artificial Sequence
  Synthetic Peptide
TPSPSTPPTPSPSCC

SEQ ID NO: 2604 - protein, 15 aa, Artificial Sequence
  Synthetic Peptide
PSPSTPPTPSPSCCH

SEQ ID NO: 2605 - protein, 14 aa, Artificial Sequence
  Synthetic Peptide
PVPSTPPTPSPSTP

SEQ ID NO: 2606 - protein, 14 aa, Artificial Sequence
  Synthetic Peptide
VPSTPPTPSPSTPP

SEQ ID NO: 2607 - protein, 14 aa, Artificial Sequence
  Synthetic Peptide
PSTPPTPSPSTPPT

SEQ ID NO: 2608 - protein, 14 aa, Artificial Sequence
  Synthetic Peptide
STPPTPSPSTPPTP

SEQ ID NO: 2609 - protein, 14 aa, Artificial Sequence
  Synthetic Peptide
TPPTPSPSTPPTPS

SEQ ID NO: 2610 - protein, 14 aa, Artificial Sequence
  Synthetic Peptide
PPTPSPSTPPTPSP

SEQ ID NO: 2611 - protein, 14 aa, Artificial Sequence
  Synthetic Peptide
PTPSPSTPPTPSPS

SEQ ID NO: 2612 - protein, 14 aa, Artificial Sequence
  Synthetic Peptide
TPSPSTPPTPSPSC

SEQ ID NO: 2613 - protein, 14 aa, Artificial Sequence
  Synthetic Peptide
PSPSTPPTPSPSCC

SEQ ID NO: 2614 - protein, 14 aa, Artificial Sequence
  Synthetic Peptide
SPSTPPTPSPSCCH

SEQ ID NO: 2615 - protein, 13 aa, Artificial Sequence
  Synthetic Peptide
PVPSTPPTPSPST

SEQ ID NO: 2616 - protein, 13 aa, Artificial Sequence
  Synthetic Peptide
VPSTPPTPSPSTP

SEQ ID NO: 2617 - protein, 13 aa, Artificial Sequence
  Synthetic Peptide
PSTPPTPSPSTPP

SEQ ID NO: 2618 - protein, 13 aa, Artificial Sequence
  Synthetic Peptide
STPPTPSPSTPPT

SEQ ID NO: 2619 - protein, 13 aa, Artificial Sequence
  Synthetic Peptide
TPPTPSPSTPPTP

SEQ ID NO: 2620 - protein, 13 aa, Artificial Sequence
  Synthetic Peptide
PPTPSPSTPPTPS

SEQ ID NO: 2621 - protein, 13 aa, Artificial Sequence
  Synthetic Peptide
PTPSPSTPPTPSP

SEQ ID NO: 2622 - protein, 13 aa, Artificial Sequence
  Synthetic Peptide
TPSPSTPPTPSPS

SEQ ID NO: 2623 - protein, 13 aa, Artificial Sequence
  Synthetic Peptide
PSPSTPPTPSPSC

SEQ ID NO: 2624 - protein, 13 aa, Artificial Sequence
  Synthetic Peptide
SPSTPPTPSPSCC

SEQ ID NO: 2625 - protein, 13 aa, Artificial Sequence
  Synthetic Peptide
PSTPPTPSPSCCH

SEQ ID NO: 2626 - protein, 12 aa, Artificial Sequence
  Synthetic Peptide
PVPSTPPTPSPS

SEQ ID NO: 2627 - protein, 12 aa, Artificial Sequence
  Synthetic Peptide
VPSTPPTPSPST

SEQ ID NO: 2628 - protein, 12 aa, Artificial Sequence
  Synthetic Peptide
PSTPPTPSPSTP

SEQ ID NO: 2629 - protein, 12 aa, Artificial Sequence
  Synthetic Peptide
STPPTPSPSTPP

SEQ ID NO: 2630 - protein, 12 aa, Artificial Sequence
  Synthetic Peptide
TPPTPSPSTPPT

SEQ ID NO: 2631 - protein, 12 aa, Artificial Sequence
  Synthetic Peptide
PPTPSPSTPPTP

SEQ ID NO: 2632 - protein, 12 aa, Artificial Sequence
  Synthetic Peptide
PTPSPSTPPTPS

SEQ ID NO: 2633 - protein, 12 aa, Artificial Sequence
  Synthetic Peptide
TPSPSTPPTPSP

SEQ ID NO: 2634 - protein, 12 aa, Artificial Sequence
  Synthetic Peptide
PSPSTPPTPSPS

SEQ ID NO: 2635 - protein, 12 aa, Artificial Sequence
  Synthetic Peptide
SPSTPPTPSPSC

SEQ ID NO: 2636 - protein, 12 aa, Artificial Sequence
  Synthetic Peptide
PSTPPTPSPSCC

SEQ ID NO: 2637 - protein, 12 aa, Artificial Sequence
  Synthetic Peptide
STPPTPSPSCCH

SEQ ID NO: 2638 - protein, 11 aa, Artificial Sequence
  Synthetic Peptide
PVPSTPPTPSP

SEQ ID NO: 2639 - protein, 11 aa, Artificial Sequence
  Synthetic Peptide
VPSTPPTPSPS

SEQ ID NO: 2640 - protein, 11 aa, Artificial Sequence
  Synthetic Peptide
PSTPPTPSPST

SEQ ID NO: 2641 - protein, 11 aa, Artificial Sequence
  Synthetic Peptide
STPPTPSPSTP

SEQ ID NO: 2642 - protein, 11 aa, Artificial Sequence
  Synthetic Peptide
TPPTPSPSTPP

SEQ ID NO: 2643 - protein, 11 aa, Artificial Sequence
  Synthetic Peptide
PPTPSPSTPPT

SEQ ID NO: 2644 - protein, 11 aa, Artificial Sequence
  Synthetic Peptide
PTPSPSTPPTP

SEQ ID NO: 2645 - protein, 11 aa, Artificial Sequence
  Synthetic Peptide
TPSPSTPPTPS

SEQ ID NO: 2646 - protein, 11 aa, Artificial Sequence
  Synthetic Peptide
PSPSTPPTPSP

SEQ ID NO: 2647 - protein, 11 aa, Artificial Sequence
  Synthetic Peptide
SPSTPPTPSPS

SEQ ID NO: 2648 - protein, 11 aa, Artificial Sequence
  Synthetic Peptide
PSTPPTPSPSC

SEQ ID NO: 2649 - protein, 11 aa, Artificial Sequence
  Synthetic Peptide
STPPTPSPSCC

SEQ ID NO: 2650 - protein, 11 aa, Artificial Sequence
  Synthetic Peptide
TPPTPSPSCCH

SEQ ID NO: 2651 - protein, 10 aa, Artificial Sequence
  Synthetic Peptide
PVPSTPPTPS

SEQ ID NO: 2652 - protein, 10 aa, Artificial Sequence
  Synthetic Peptide
VPSTPPTPSP

SEQ ID NO: 2653 - protein, 10 aa, Artificial Sequence
  Synthetic Peptide
PSTPPTPSPS

SEQ ID NO: 2654 - protein, 10 aa, Artificial Sequence
  Synthetic Peptide
STPPTPSPST

SEQ ID NO: 2655 - protein, 10 aa, Artificial Sequence
  Synthetic Peptide
TPPTPSPSTP

SEQ ID NO: 2656 - protein, 10 aa, Artificial Sequence
  Synthetic Peptide
PPTPSPSTPP

SEQ ID NO: 2657 - protein, 10 aa, Artificial Sequence
  Synthetic Peptide
PTPSPSTPPT

SEQ ID NO: 2658 - protein, 10 aa, Artificial Sequence
  Synthetic Peptide
TPSPSTPPTP

SEQ ID NO: 2659 - protein, 10 aa, Artificial Sequence
  Synthetic Peptide
PSPSTPPTPS

SEQ ID NO: 2660 - protein, 10 aa, Artificial Sequence
  Synthetic Peptide
SPSTPPTPSP

SEQ ID NO: 2661 - protein, 10 aa, Artificial Sequence
  Synthetic Peptide
PSTPPTPSPS

SEQ ID NO: 2662 - protein, 10 aa, Artificial Sequence
  Synthetic Peptide
STPPTPSPSC

SEQ ID NO: 2663 - protein, 10 aa, Artificial Sequence
  Synthetic Peptide
TPPTPSPSCC

SEQ ID NO: 2664 - protein, 10 aa, Artificial Sequence
  Synthetic Peptide
PPTPSPSCCH

SEQ ID NO: 2665 - protein, 9 aa, Artificial Sequence
  Synthetic Peptide
PVPSTPPTP

SEQ ID NO: 2666 - protein, 9 aa, Artificial Sequence
  Synthetic Peptide
VPSTPPTPS

SEQ ID NO: 2667 - protein, 9 aa, Artificial Sequence
  Synthetic Peptide
PSTPPTPSP

SEQ ID NO: 2668 - protein, 9 aa, Artificial Sequence
  Synthetic Peptide
STPPTPSPS

SEQ ID NO: 2669 - protein, 9 aa, Artificial Sequence
  Synthetic Peptide
TPPTPSPST

SEQ ID NO: 2670 - protein, 9 aa, Artificial Sequence
  Synthetic Peptide
PPTPSPSTP

SEQ ID NO: 2671 - protein, 9 aa, Artificial Sequence
  Synthetic Peptide
PTPSPSTPP

SEQ ID NO: 2672 - protein, 9 aa, Artificial Sequence
  Synthetic Peptide
TPSPSTPPT

SEQ ID NO: 2673 - protein, 9 aa, Artificial Sequence
  Synthetic Peptide
PSPSTPPTP

SEQ ID NO: 2674 - protein, 9 aa, Artificial Sequence
  Synthetic Peptide
SPSTPPTPS

SEQ ID NO: 2675 - protein, 9 aa, Artificial Sequence
  Synthetic Peptide
PSTPPTPSP

SEQ ID NO: 2676 - protein, 9 aa, Artificial Sequence
  Synthetic Peptide
STPPTPSPS

SEQ ID NO: 2677 - protein, 9 aa, Artificial Sequence
  Synthetic Peptide
TPPTPSPSC

SEQ ID NO: 2678 - protein, 9 aa, Artificial Sequence
  Synthetic Peptide
PPTPSPSCC

SEQ ID NO: 2679 - protein, 9 aa, Artificial Sequence
  Synthetic Peptide
PTPSPSCCH

SEQ ID NO: 2680 - protein, 8 aa, Artificial Sequence
  Synthetic Peptide
PVPSTPPT

SEQ ID NO: 2681 - protein, 8 aa, Artificial Sequence
  Synthetic Peptide
VPSTPPTP

SEQ ID NO: 2682 - protein, 8 aa, Artificial Sequence
  Synthetic Peptide
PSTPPTPS

SEQ ID NO: 2683 - protein, 8 aa, Artificial Sequence
  Synthetic Peptide
STPPTPSP

SEQ ID NO: 2684 - protein, 8 aa, Artificial Sequence
  Synthetic Peptide
TPPTPSPS

SEQ ID NO: 2685 - protein, 8 aa, Artificial Sequence
  Synthetic Peptide
PPTPSPST

SEQ ID NO: 2686 - protein, 8 aa, Artificial Sequence
  Synthetic Peptide
PTPSPSTP

SEQ ID NO: 2687 - protein, 8 aa, Artificial Sequence
  Synthetic Peptide
TPSPSTPP

SEQ ID NO: 2688 - protein, 8 aa, Artificial Sequence
  Synthetic Peptide
PSPSTPPT

SEQ ID NO: 2689 - protein, 8 aa, Artificial Sequence
  Synthetic Peptide
SPSTPPTP

SEQ ID NO: 2690 - protein, 8 aa, Artificial Sequence
  Synthetic Peptide
PSTPPTPS

SEQ ID NO: 2691 - protein, 8 aa, Artificial Sequence
  Synthetic Peptide
STPPTPSP

SEQ ID NO: 2692 - protein, 8 aa, Artificial Sequence
  Synthetic Peptide
TPPTPSPS

SEQ ID NO: 2693 - protein, 8 aa, Artificial Sequence
  Synthetic Peptide
PPTPSPSC

SEQ ID NO: 2694 - protein, 8 aa, Artificial Sequence
  Synthetic Peptide
PTPSPSCC

SEQ ID NO: 2695 - protein, 8 aa, Artificial Sequence
  Synthetic Peptide
TPSPSCCH

SEQ ID NO: 2696 - protein, 7 aa, Artificial Sequence
  Synthetic Peptide
PVPSTPP

SEQ ID NO: 2697 - protein, 7 aa, Artificial Sequence
  Synthetic Peptide
VPSTPPT

SEQ ID NO: 2698 - protein, 7 aa, Artificial Sequence
  Synthetic Peptide
PSTPPTP

SEQ ID NO: 2699 - protein, 7 aa, Artificial Sequence
  Synthetic Peptide
STPPTPS

SEQ ID NO: 2700 - protein, 7 aa, Artificial Sequence
  Synthetic Peptide
TPPTPSP

SEQ ID NO: 2701 - protein, 7 aa, Artificial Sequence
  Synthetic Peptide
PPTPSPS

SEQ ID NO: 2702 - protein, 7 aa, Artificial Sequence
  Synthetic Peptide
PTPSPST

SEQ ID NO: 2703 - protein, 7 aa, Artificial Sequence
  Synthetic Peptide
TPSPSTP

SEQ ID NO: 2704 - protein, 7 aa, Artificial Sequence
  Synthetic Peptide
PSPSTPP

SEQ ID NO: 2705 - protein, 7 aa, Artificial Sequence
  Synthetic Peptide
SPSTPPT

SEQ ID NO: 2706 - protein, 7 aa, Artificial Sequence
  Synthetic Peptide
PSTPPTP

SEQ ID NO: 2707 - protein, 7 aa, Artificial Sequence
  Synthetic Peptide
STPPTPS

SEQ ID NO: 2708 - protein, 7 aa, Artificial Sequence
  Synthetic Peptide
TPPTPSP

SEQ ID NO: 2709 - protein, 7 aa, Artificial Sequence
  Synthetic Peptide
PPTPSPS

SEQ ID NO: 2710 - protein, 7 aa, Artificial Sequence
  Synthetic Peptide
PTPSPSC

SEQ ID NO: 2711 - protein, 7 aa, Artificial Sequence
  Synthetic Peptide
TPSPSCC

SEQ ID NO: 2712 - protein, 7 aa, Artificial Sequence
  Synthetic Peptide
PSPSCCH

SEQ ID NO: 2713 - protein, 10 aa, Artificial Sequence
  Synthetic Peptide
PVPPPPPCCH

SEQ ID NO: 2714 - protein, 9 aa, Artificial Sequence
  Synthetic Peptide
PVPPPPPCC

SEQ ID NO: 2715 - protein, 9 aa, Artificial Sequence
  Synthetic Peptide
VPPPPPCCH

SEQ ID NO: 2716 - protein, 8 aa, Artificial Sequence
  Synthetic Peptide
PVPPPPPC

SEQ ID NO: 2717 - protein, 8 aa, Artificial Sequence
  Synthetic Peptide
VPPPPPCC

SEQ ID NO: 2718 - protein, 8 aa, Artificial Sequence
  Synthetic Peptide
PPPPPCCH

SEQ ID NO: 2719 - protein, 7 aa, Artificial Sequence
  Synthetic Peptide
PVPPPPP

SEQ ID NO: 2720 - protein, 7 aa, Artificial Sequence
  Synthetic Peptide
VPPPPPC

SEQ ID NO: 2721 - protein, 7 aa, Artificial Sequence
  Synthetic Peptide
PPPPPCC

SEQ ID NO: 2722 - protein, 7 aa, Artificial Sequence
  Synthetic Peptide
PPPPCCH

SEQ ID NO: 2723 - protein, 15 aa, Artificial Sequence
  Synthetic Peptide
EPKSCDKTHTCPPCP

SEQ ID NO: 2724 - protein, 14 aa, Artificial Sequence
  Synthetic Peptide
EPKSCDKTHTCPPC

SEQ ID NO: 2725 - protein, 14 aa, Artificial Sequence
  Synthetic Peptide
PKSCDKTHTCPPCP

SEQ ID NO: 2726 - protein, 13 aa, Artificial Sequence
  Synthetic Peptide
EPKSCDKTHTCPP

SEQ ID NO: 2727 - protein, 13 aa, Artificial Sequence
  Synthetic Peptide
PKSCDKTHTCPPC

SEQ ID NO: 2728 - protein, 13 aa, Artificial Sequence
  Synthetic Peptide
KSCDKTHTCPPCP

SEQ ID NO: 2729 - protein, 12 aa, Artificial Sequence
  Synthetic Peptide
EPKSCDKTHTCP

SEQ ID NO: 2730 - protein, 12 aa, Artificial Sequence
  Synthetic Peptide
PKSCDKTHTCPP

SEQ ID NO: 2731 - protein, 12 aa, Artificial Sequence
  Synthetic Peptide
KSCDKTHTCPPC

SEQ ID NO: 2732 - protein, 12 aa, Artificial Sequence
  Synthetic Peptide
SCDKTHTCPPCP

SEQ ID NO: 2733 - protein, 11 aa, Artificial Sequence
  Synthetic Peptide
EPKSCDKTHTC

SEQ ID NO: 2734 - protein, 11 aa, Artificial Sequence
  Synthetic Peptide
PKSCDKTHTCP

SEQ ID NO: 2735 - protein, 11 aa, Artificial Sequence
  Synthetic Peptide
KSCDKTHTCPP

SEQ ID NO: 2736 - protein, 11 aa, Artificial Sequence
  Synthetic Peptide
SCDKTHTCPPC

SEQ ID NO: 2737 - protein, 11 aa, Artificial Sequence
  Synthetic Peptide
CDKTHTCPPCP

SEQ ID NO: 2738 - protein, 10 aa, Artificial Sequence
  Synthetic Peptide
EPKSCDKTHT

SEQ ID NO: 2739 - protein, 10 aa, Artificial Sequence
  Synthetic Peptide
PKSCDKTHTC

SEQ ID NO: 2740 - protein, 10 aa, Artificial Sequence
  Synthetic Peptide
KSCDKTHTCP

SEQ ID NO: 2741 - protein, 10 aa, Artificial Sequence
  Synthetic Peptide
SCDKTHTCPP

SEQ ID NO: 2742 - protein, 10 aa, Artificial Sequence
  Synthetic Peptide
CDKTHTCPPC

SEQ ID NO: 2743 - protein, 10 aa, Artificial Sequence
  Synthetic Peptide
DKTHTCPPCP

SEQ ID NO: 2744 - protein, 9 aa, Artificial Sequence
  Synthetic Peptide
EPKSCDKTH

SEQ ID NO: 2745 - protein, 9 aa, Artificial Sequence
  Synthetic Peptide
PKSCDKTHT

SEQ ID NO: 2746 - protein, 9 aa, Artificial Sequence
  Synthetic Peptide
KSCDKTHTC

SEQ ID NO: 2747 - protein, 9 aa, Artificial Sequence
  Synthetic Peptide
SCDKTHTCP

SEQ ID NO: 2748 - protein, 9 aa, Artificial Sequence
  Synthetic Peptide
CDKTHTCPP

SEQ ID NO: 2749 - protein, 9 aa, Artificial Sequence
  Synthetic Peptide
DKTHTCPPC

SEQ ID NO: 2750 - protein, 9 aa, Artificial Sequence
  Synthetic Peptide
KTHTCPPCP

SEQ ID NO: 2751 - protein, 8 aa, Artificial Sequence
  Synthetic Peptide
EPKSCDKT

SEQ ID NO: 2752 - protein, 8 aa, Artificial Sequence
  Synthetic Peptide
PKSCDKTH

SEQ ID NO: 2753 - protein, 8 aa, Artificial Sequence
  Synthetic Peptide
KSCDKTHT

SEQ ID NO: 2754 - protein, 8 aa, Artificial Sequence
  Synthetic Peptide
SCDKTHTC

SEQ ID NO: 2755 - protein, 8 aa, Artificial Sequence
  Synthetic Peptide
CDKTHTCP

SEQ ID NO: 2756 - protein, 8 aa, Artificial Sequence
  Synthetic Peptide
DKTHTCPP

SEQ ID NO: 2757 - protein, 8 aa, Artificial Sequence
  Synthetic Peptide
KTHTCPPC

SEQ ID NO: 2758 - protein, 8 aa, Artificial Sequence
  Synthetic Peptide
THTCPPCP

SEQ ID NO: 2759 - protein, 7 aa, Artificial Sequence
  Synthetic Peptide
EPKSCDK

SEQ ID NO: 2760 - protein, 7 aa, Artificial Sequence
  Synthetic Peptide
PKSCDKT

SEQ ID NO: 2761 - protein, 7 aa, Artificial Sequence
  Synthetic Peptide
KSCDKTH

SEQ ID NO: 2762 - protein, 7 aa, Artificial Sequence
  Synthetic Peptide
SCDKTHT

SEQ ID NO: 2763 - protein, 7 aa, Artificial Sequence
  Synthetic Peptide
CDKTHTC

SEQ ID NO: 2764 - protein, 7 aa, Artificial Sequence
  Synthetic Peptide
DKTHTCP

SEQ ID NO: 2765 - protein, 7 aa, Artificial Sequence
  Synthetic Peptide
KTHTCPP

SEQ ID NO: 2766 - protein, 7 aa, Artificial Sequence
  Synthetic Peptide
THTCPPC

SEQ ID NO: 2767 - protein, 7 aa, Artificial Sequence
  Synthetic Peptide
HTCPPCP

SEQ ID NO: 2768 - protein, 11 aa, Artificial Sequence
  Synthetic Peptide
ERKCCVECPPC

SEQ ID NO: 2769 - protein, 10 aa, Artificial Sequence
  Synthetic Peptide
RKCCVECPPC

SEQ ID NO: 2770 - protein, 10 aa, Artificial Sequence
  Synthetic Peptide
ERKCCVECPP

SEQ ID NO: 2771 - protein, 9 aa, Artificial Sequence
  Synthetic Peptide
ERKCCVECP

SEQ ID NO: 2772 - protein, 9 aa, Artificial Sequence
  Synthetic Peptide
RKCCVECPP

SEQ ID NO: 2773 - protein, 9 aa, Artificial Sequence
  Synthetic Peptide
KCCVECPPC

SEQ ID NO: 2774 - protein, 8 aa, Artificial Sequence
  Synthetic Peptide
ERKCCVEC

SEQ ID NO: 2775 - protein, 8 aa, Artificial Sequence
  Synthetic Peptide
RKCCVECP

SEQ ID NO: 2776 - protein, 8 aa, Artificial Sequence
  Synthetic Peptide
KCCVECPP

SEQ ID NO: 2777 - protein, 8 aa, Artificial Sequence
  Synthetic Peptide
CCVECPPC

SEQ ID NO: 2778 - protein, 7 aa, Artificial Sequence
  Synthetic Peptide
ERKCCVE

SEQ ID NO: 2779 - protein, 7 aa, Artificial Sequence
  Synthetic Peptide
RKCCVEC

SEQ ID NO: 2780 - protein, 7 aa, Artificial Sequence
  Synthetic Peptide
KCCVECP

SEQ ID NO: 2781 - protein, 7 aa, Artificial Sequence
  Synthetic Peptide
CCVECPP

SEQ ID NO: 2782 - protein, 7 aa, Artificial Sequence
  Synthetic Peptide
CVECPPC

SEQ ID NO: 2783 - protein, 25 aa, Artificial Sequence
  Synthetic Peptide
PLPVIAELPPKVSVFVPPRDGFFGN

SEQ ID NO: 2784 - protein, 25 aa, Artificial Sequence
  Synthetic Peptide
LPVIAELPPKVSVFVPPRDGFFGNP

SEQ ID NO: 2785 - protein, 24 aa, Artificial Sequence
  Synthetic Peptide
PLPVIAELPPKVSVFVPPRDGFFG

SEQ ID NO: 2786 - protein, 24 aa, Artificial Sequence
  Synthetic Peptide
LPVIAELPPKVSVFVPPRDGFFGN

SEQ ID NO: 2787 - protein, 24 aa, Artificial Sequence
  Synthetic Peptide
PVIAELPPKVSVFVPPRDGFFGNP

SEQ ID NO: 2788 - protein, 23 aa, Artificial Sequence
  Synthetic Peptide
PLPVIAELPPKVSVFVPPRDGFF

SEQ ID NO: 2789 - protein, 23 aa, Artificial Sequence
  Synthetic Peptide
LPVIAELPPKVSVFVPPRDGFFG

SEQ ID NO: 2790 - protein, 23 aa, Artificial Sequence
  Synthetic Peptide
PVIAELPPKVSVFVPPRDGFFGN

SEQ ID NO: 2791 - protein, 23 aa, Artificial Sequence
  Synthetic Peptide
VIAELPPKVSVFVPPRDGFFGNP

SEQ ID NO: 2792 - protein, 22 aa, Artificial Sequence
  Synthetic Peptide
PLPVIAELPPKVSVFVPPRDGF

SEQ ID NO: 2793 - protein, 22 aa, Artificial Sequence
  Synthetic Peptide
LPVIAELPPKVSVFVPPRDGFF

SEQ ID NO: 2794 - protein, 22 aa, Artificial Sequence
  Synthetic Peptide
PVIAELPPKVSVFVPPRDGFFG

SEQ ID NO: 2795 - protein, 22 aa, Artificial Sequence
  Synthetic Peptide
VIAELPPKVSVFVPPRDGFFGN

SEQ ID NO: 2796 - protein, 22 aa, Artificial Sequence
  Synthetic Peptide
IAELPPKVSVFVPPRDGFFGNP

SEQ ID NO: 2797 - protein, 21 aa, Artificial Sequence
  Synthetic Peptide
PLPVIAELPPKVSVFVPPRDG

SEQ ID NO: 2798 - protein, 21 aa, Artificial Sequence
  Synthetic Peptide
LPVIAELPPKVSVFVPPRDGF

SEQ ID NO: 2799 - protein, 21 aa, Artificial Sequence
  Synthetic Peptide
PVIAELPPKVSVFVPPRDGFF

SEQ ID NO: 2800 - protein, 21 aa, Artificial Sequence
  Synthetic Peptide
VIAELPPKVSVFVPPRDGFFG

SEQ ID NO: 2801 - protein, 21 aa, Artificial Sequence
  Synthetic Peptide
IAELPPKVSVFVPPRDGFFGN

SEQ ID NO: 2802 - protein, 21 aa, Artificial Sequence
  Synthetic Peptide
AELPPKVSVFVPPRDGFFGNP

SEQ ID NO: 2803 - protein, 20 aa, Artificial Sequence
  Synthetic Peptide
PLPVIAELPPKVSVFVPPRD

SEQ ID NO: 2804 - protein, 20 aa, Artificial Sequence
  Synthetic Peptide
LPVIAELPPKVSVFVPPRDG

SEQ ID NO: 2805 - protein, 20 aa, Artificial Sequence
  Synthetic Peptide
PVIAELPPKVSVFVPPRDGF

SEQ ID NO: 2806 - protein, 20 aa, Artificial Sequence
  Synthetic Peptide
VIAELPPKVSVFVPPRDGFF

SEQ ID NO: 2807 - protein, 20 aa, Artificial Sequence
  Synthetic Peptide
IAELPPKVSVFVPPRDGFFG

SEQ ID NO: 2808 - protein, 20 aa, Artificial Sequence
  Synthetic Peptide
AELPPKVSVFVPPRDGFFGN

SEQ ID NO: 2809 - protein, 20 aa, Artificial Sequence
  Synthetic Peptide
ELPPKVSVFVPPRDGFFGNP

SEQ ID NO: 2810 - protein, 19 aa, Artificial Sequence
  Synthetic Peptide
PLPVIAELPPKVSVFVPPR

SEQ ID NO: 2811 - protein, 19 aa, Artificial Sequence
  Synthetic Peptide
LPVIAELPPKVSVFVPPRD

SEQ ID NO: 2812 - protein, 19 aa, Artificial Sequence
  Synthetic Peptide
PVIAELPPKVSVFVPPRDG

SEQ ID NO: 2813 - protein, 62 aa, Artificial Sequence
  Synthetic Peptide
ELKTPLGDTTHTCPRCPEPKSCDTPPPCPRCPEPKSCDTPPPCPRCPEPKSCDTPPPCPRCP

SEQ ID NO: 2814 - protein, 61 aa, Artificial Sequence
  Synthetic Peptide
ELKTPLGDTTHTCPRCPEPKSCDTPPPCPRCPEPKSCDTPPPCPRCPEPKSCDTPPPCPRC

SEQ ID NO: 2815 - protein, 61 aa, Artificial Sequence
  Synthetic Peptide
LKTPLGDTTHTCPRCPEPKSCDTPPPCPRCPEPKSCDTPPPCPRCPEPKSCDTPPPCPRCP

SEQ ID NO: 2816 - protein, 60 aa, Artificial Sequence
  Synthetic Peptide
ELKTPLGDTTHTCPRCPEPKSCDTPPPCPRCPEPKSCDTPPPCPRCPEPKSCDTPPPCPR

SEQ ID NO: 2817 - protein, 60 aa, Artificial Sequence
  Synthetic Peptide
LKTPLGDTTHTCPRCPEPKSCDTPPPCPRCPEPKSCDTPPPCPRCPEPKSCDTPPPCPRC

SEQ ID NO: 2818 - protein, 60 aa, Artificial Sequence
  Synthetic Peptide
KTPLGDTTHTCPRCPEPKSCDTPPPCPRCPEPKSCDTPPPCPRCPEPKSCDTPPPCPRCP

SEQ ID NO: 2819 - protein, 59 aa, Artificial Sequence
  Synthetic Peptide
ELKTPLGDTTHTCPRCPEPKSCDTPPPCPRCPEPKSCDTPPPCPRCPEPKSCDTPPPCP

SEQ ID NO: 2820 - protein, 59 aa, Artificial Sequence
  Synthetic Peptide
LKTPLGDTTHTCPRCPEPKSCDTPPPCPRCPEPKSCDTPPPCPRCPEPKSCDTPPPCPR

SEQ ID NO: 2821 - protein, 59 aa, Artificial Sequence
  Synthetic Peptide
KTPLGDTTHTCPRCPEPKSCDTPPPCPRCPEPKSCDTPPPCPRCPEPKSCDTPPPCPRC

SEQ ID NO: 2822 - protein, 59 aa, Artificial Sequence
  Synthetic Peptide
TPLGDTTHTCPRCPEPKSCDTPPPCPRCPEPKSCDTPPPCPRCPEPKSCDTPPPCPRCP

SEQ ID NO: 2823 - protein, 58 aa, Artificial Sequence
  Synthetic Peptide
ELKTPLGDTTHTCPRCPEPKSCDTPPPCPRCPEPKSCDTPPPCPRCPEPKSCDTPPPC

SEQ ID NO: 2824 - protein, 58 aa, Artificial Sequence
  Synthetic Peptide
LKTPLGDTTHTCPRCPEPKSCDTPPPCPRCPEPKSCDTPPPCPRCPEPKSCDTPPPCP

SEQ ID NO: 2825 - protein, 58 aa, Artificial Sequence
  Synthetic Peptide
KTPLGDTTHTCPRCPEPKSCDTPPPCPRCPEPKSCDTPPPCPRCPEPKSCDTPPPCPR

SEQ ID NO: 2826 - protein, 58 aa, Artificial Sequence
  Synthetic Peptide
TPLGDTTHTCPRCPEPKSCDTPPPCPRCPEPKSCDTPPPCPRCPEPKSCDTPPPCPRC

SEQ ID NO: 2827 - protein, 58 aa, Artificial Sequence
  Synthetic Peptide
PLGDTTHTCPRCPEPKSCDTPPPCPRCPEPKSCDTPPPCPRCPEPKSCDTPPPCPRCP

SEQ ID NO: 2828 - protein, 57 aa, Artificial Sequence
  Synthetic Peptide
ELKTPLGDTTHTCPRCPEPKSCDTPPPCPRCPEPKSCDTPPPCPRCPEPKSCDTPPP

SEQ ID NO: 2829 - protein, 57 aa, Artificial Sequence
  Synthetic Peptide
LKTPLGDTTHTCPRCPEPKSCDTPPPCPRCPEPKSCDTPPPCPRCPEPKSCDTPPPC

SEQ ID NO: 2830 - protein, 57 aa, Artificial Sequence
  Synthetic Peptide
KTPLGDTTHTCPRCPEPKSCDTPPPCPRCPEPKSCDTPPPCPRCPEPKSCDTPPPCP

SEQ ID NO: 2831 - protein, 57 aa, Artificial Sequence
  Synthetic Peptide
TPLGDTTHTCPRCPEPKSCDTPPPCPRCPEPKSCDTPPPCPRCPEPKSCDTPPPCPR

SEQ ID NO: 2832 - protein, 57 aa, Artificial Sequence
  Synthetic Peptide
PLGDTTHTCPRCPEPKSCDTPPPCPRCPEPKSCDTPPPCPRCPEPKSCDTPPPCPRC

SEQ ID NO: 2833 - protein, 57 aa, Artificial Sequence
  Synthetic Peptide
LGDTTHTCPRCPEPKSCDTPPPCPRCPEPKSCDTPPPCPRCPEPKSCDTPPPCPRCP

SEQ ID NO: 2834 - protein, 56 aa, Artificial Sequence
  Synthetic Peptide
ELKTPLGDTTHTCPRCPEPKSCDTPPPCPRCPEPKSCDTPPPCPRCPEPKSCDTPP

SEQ ID NO: 2835 - protein, 56 aa, Artificial Sequence
  Synthetic Peptide
LKTPLGDTTHTCPRCPEPKSCDTPPPCPRCPEPKSCDTPPPCPRCPEPKSCDTPPP

SEQ ID NO: 2836 - protein, 56 aa, Artificial Sequence
  Synthetic Peptide
KTPLGDTTHTCPRCPEPKSCDTPPPCPRCPEPKSCDTPPPCPRCPEPKSCDTPPPC

SEQ ID NO: 2837 - protein, 56 aa, Artificial Sequence
  Synthetic Peptide
TPLGDTTHTCPRCPEPKSCDTPPPCPRCPEPKSCDTPPPCPRCPEPKSCDTPPPCP

SEQ ID NO: 2838 - protein, 56 aa, Artificial Sequence
  Synthetic Peptide
PLGDTTHTCPRCPEPKSCDTPPPCPRCPEPKSCDTPPPCPRCPEPKSCDTPPPCPR

SEQ ID NO: 2839 - protein, 56 aa, Artificial Sequence
  Synthetic Peptide
LGDTTHTCPRCPEPKSCDTPPPCPRCPEPKSCDTPPPCPRCPEPKSCDTPPPCPRC

SEQ ID NO: 2840 - protein, 56 aa, Artificial Sequence
  Synthetic Peptide
GDTTHTCPRCPEPKSCDTPPPCPRCPEPKSCDTPPPCPRCPEPKSCDTPPPCPRCP

SEQ ID NO: 2841 - protein, 55 aa, Artificial Sequence
  Synthetic Peptide
ELKTPLGDTTHTCPRCPEPKSCDTPPPCPRCPEPKSCDTPPPCPRCPEPKSCDTP

SEQ ID NO: 2842 - protein, 55 aa, Artificial Sequence
  Synthetic Peptide
LKTPLGDTTHTCPRCPEPKSCDTPPPCPRCPEPKSCDTPPPCPRCPEPKSCDTPP

SEQ ID NO: 2843 - protein, 55 aa, Artificial Sequence
  Synthetic Peptide
KTPLGDTTHTCPRCPEPKSCDTPPPCPRCPEPKSCDTPPPCPRCPEPKSCDTPPP

SEQ ID NO: 2844 - protein, 55 aa, Artificial Sequence
  Synthetic Peptide
TPLGDTTHTCPRCPEPKSCDTPPPCPRCPEPKSCDTPPPCPRCPEPKSCDTPPPC

SEQ ID NO: 2845 - protein, 55 aa, Artificial Sequence
  Synthetic Peptide
PLGDTTHTCPRCPEPKSCDTPPPCPRCPEPKSCDTPPPCPRCPEPKSCDTPPPCP

SEQ ID NO: 2846 - protein, 55 aa, Artificial Sequence
  Synthetic Peptide
LGDTTHTCPRCPEPKSCDTPPPCPRCPEPKSCDTPPPCPRCPEPKSCDTPPPCPR

SEQ ID NO: 2847 - protein, 55 aa, Artificial Sequence
  Synthetic Peptide
GDTTHTCPRCPEPKSCDTPPPCPRCPEPKSCDTPPPCPRCPEPKSCDTPPPCPRC

SEQ ID NO: 2848 - protein, 55 aa, Artificial Sequence
  Synthetic Peptide
DTTHTCPRCPEPKSCDTPPPCPRCPEPKSCDTPPPCPRCPEPKSCDTPPPCPRCP

SEQ ID NO: 2849 - protein, 54 aa, Artificial Sequence
  Synthetic Peptide
ELKTPLGDTTHTCPRCPEPKSCDTPPPCPRCPEPKSCDTPPPCPRCPEPKSCDT

SEQ ID NO: 2850 - protein, 54 aa, Artificial Sequence
  Synthetic Peptide
LKTPLGDTTHTCPRCPEPKSCDTPPPCPRCPEPKSCDTPPPCPRCPEPKSCDTP

SEQ ID NO: 2851 - protein, 54 aa, Artificial Sequence
  Synthetic Peptide
KTPLGDTTHTCPRCPEPKSCDTPPPCPRCPEPKSCDTPPPCPRCPEPKSCDTPP

SEQ ID NO: 2852 - protein, 54 aa, Artificial Sequence
  Synthetic Peptide
TPLGDTTHTCPRCPEPKSCDTPPPCPRCPEPKSCDTPPPCPRCPEPKSCDTPPP

SEQ ID NO: 2853 - protein, 54 aa, Artificial Sequence
  Synthetic Peptide
PLGDTTHTCPRCPEPKSCDTPPPCPRCPEPKSCDTPPPCPRCPEPKSCDTPPPC

SEQ ID NO: 2854 - protein, 54 aa, Artificial Sequence
  Synthetic Peptide
LGDTTHTCPRCPEPKSCDTPPPCPRCPEPKSCDTPPPCPRCPEPKSCDTPPPCP

SEQ ID NO: 2855 - protein, 54 aa, Artificial Sequence
  Synthetic Peptide
GDTTHTCPRCPEPKSCDTPPPCPRCPEPKSCDTPPPCPRCPEPKSCDTPPPCPR

SEQ ID NO: 2856 - protein, 54 aa, Artificial Sequence
  Synthetic Peptide
DTTHTCPRCPEPKSCDTPPPCPRCPEPKSCDTPPPCPRCPEPKSCDTPPPCPRC

SEQ ID NO: 2857 - protein, 54 aa, Artificial Sequence
  Synthetic Peptide
TTHTCPRCPEPKSCDTPPPCPRCPEPKSCDTPPPCPRCPEPKSCDTPPPCPRCP

SEQ ID NO: 2858 - protein, 53 aa, Artificial Sequence
  Synthetic Peptide
ELKTPLGDTTHTCPRCPEPKSCDTPPPCPRCPEPKSCDTPPPCPRCPEPKSCD

SEQ ID NO: 2859 - protein, 53 aa, Artificial Sequence
  Synthetic Peptide
LKTPLGDTTHTCPRCPEPKSCDTPPPCPRCPEPKSCDTPPPCPRCPEPKSCDT

SEQ ID NO: 2860 - protein, 53 aa, Artificial Sequence
  Synthetic Peptide
KTPLGDTTHTCPRCPEPKSCDTPPPCPRCPEPKSCDTPPPCPRCPEPKSCDTP

SEQ ID NO: 2861 - protein, 53 aa, Artificial Sequence
  Synthetic Peptide
TPLGDTTHTCPRCPEPKSCDTPPPCPRCPEPKSCDTPPPCPRCPEPKSCDTPP

SEQ ID NO: 2862 - protein, 53 aa, Artificial Sequence
  Synthetic Peptide
PLGDTTHTCPRCPEPKSCDTPPPCPRCPEPKSCDTPPPCPRCPEPKSCDTPPP

SEQ ID NO: 2863 - protein, 53 aa, Artificial Sequence
  Synthetic Peptide
LGDTTHTCPRCPEPKSCDTPPPCPRCPEPKSCDTPPPCPRCPEPKSCDTPPPC

SEQ ID NO: 2864 - protein, 53 aa, Artificial Sequence
  Synthetic Peptide
GDTTHTCPRCPEPKSCDTPPPCPRCPEPKSCDTPPPCPRCPEPKSCDTPPPCP

SEQ ID NO: 2865 - protein, 53 aa, Artificial Sequence
  Synthetic Peptide
DTTHTCPRCPEPKSCDTPPPCPRCPEPKSCDTPPPCPRCPEPKSCDTPPPCPR

SEQ ID NO: 2866 - protein, 53 aa, Artificial Sequence
  Synthetic Peptide
TTHTCPRCPEPKSCDTPPPCPRCPEPKSCDTPPPCPRCPEPKSCDTPPPCPRC

SEQ ID NO: 2867 - protein, 53 aa, Artificial Sequence
  Synthetic Peptide
THTCPRCPEPKSCDTPPPCPRCPEPKSCDTPPPCPRCPEPKSCDTPPPCPRCP

SEQ ID NO: 2868 - protein, 52 aa, Artificial Sequence
  Synthetic Peptide
ELKTPLGDTTHTCPRCPEPKSCDTPPPCPRCPEPKSCDTPPPCPRCPEPKSC

SEQ ID NO: 2869 - protein, 52 aa, Artificial Sequence
  Synthetic Peptide
LKTPLGDTTHTCPRCPEPKSCDTPPPCPRCPEPKSCDTPPPCPRCPEPKSCD

SEQ ID NO: 2870 - protein, 52 aa, Artificial Sequence
  Synthetic Peptide
KTPLGDTTHTCPRCPEPKSCDTPPPCPRCPEPKSCDTPPPCPRCPEPKSCDT

SEQ ID NO: 2871 - protein, 52 aa, Artificial Sequence
  Synthetic Peptide
TPLGDTTHTCPRCPEPKSCDTPPPCPRCPEPKSCDTPPPCPRCPEPKSCDTP

SEQ ID NO: 2872 - protein, 52 aa, Artificial Sequence
  Synthetic Peptide
PLGDTTHTCPRCPEPKSCDTPPPCPRCPEPKSCDTPPPCPRCPEPKSCDTPP

SEQ ID NO: 2873 - protein, 52 aa, Artificial Sequence
  Synthetic Peptide
LGDTTHTCPRCPEPKSCDTPPPCPRCPEPKSCDTPPPCPRCPEPKSCDTPPP

SEQ ID NO: 2874 - protein, 52 aa, Artificial Sequence
  Synthetic Peptide
GDTTHTCPRCPEPKSCDTPPPCPRCPEPKSCDTPPPCPRCPEPKSCDTPPPC

SEQ ID NO: 2875 - protein, 52 aa, Artificial Sequence
  Synthetic Peptide
DTTHTCPRCPEPKSCDTPPPCPRCPEPKSCDTPPPCPRCPEPKSCDTPPPCP

SEQ ID NO: 2876 - protein, 52 aa, Artificial Sequence
  Synthetic Peptide
TTHTCPRCPEPKSCDTPPPCPRCPEPKSCDTPPPCPRCPEPKSCDTPPPCPR

SEQ ID NO: 2877 - protein, 52 aa, Artificial Sequence
  Synthetic Peptide
THTCPRCPEPKSCDTPPPCPRCPEPKSCDTPPPCPRCPEPKSCDTPPPCPRC

SEQ ID NO: 2878 - protein, 52 aa, Artificial Sequence
  Synthetic Peptide
HTCPRCPEPKSCDTPPPCPRCPEPKSCDTPPPCPRCPEPKSCDTPPPCPRCP

SEQ ID NO: 2879 - protein, 51 aa, Artificial Sequence
  Synthetic Peptide
ELKTPLGDTTHTCPRCPEPKSCDTPPPCPRCPEPKSCDTPPPCPRCPEPKS

SEQ ID NO: 2880 - protein, 51 aa, Artificial Sequence
  Synthetic Peptide
LKTPLGDTTHTCPRCPEPKSCDTPPPCPRCPEPKSCDTPPPCPRCPEPKSC

SEQ ID NO: 2881 - protein, 51 aa, Artificial Sequence
  Synthetic Peptide
KTPLGDTTHTCPRCPEPKSCDTPPPCPRCPEPKSCDTPPPCPRCPEPKSCD

SEQ ID NO: 2882 - protein, 51 aa, Artificial Sequence
  Synthetic Peptide
TPLGDTTHTCPRCPEPKSCDTPPPCPRCPEPKSCDTPPPCPRCPEPKSCDT

SEQ ID NO: 2883 - protein, 51 aa, Artificial Sequence
  Synthetic Peptide
PLGDTTHTCPRCPEPKSCDTPPPCPRCPEPKSCDTPPPCPRCPEPKSCDTP

SEQ ID NO: 2884 - protein, 51 aa, Artificial Sequence
  Synthetic Peptide
LGDTTHTCPRCPEPKSCDTPPPCPRCPEPKSCDTPPPCPRCPEPKSCDTPP

SEQ ID NO: 2885 - protein, 51 aa, Artificial Sequence
  Synthetic Peptide
GDTTHTCPRCPEPKSCDTPPPCPRCPEPKSCDTPPPCPRCPEPKSCDTPPP

SEQ ID NO: 2886 - protein, 51 aa, Artificial Sequence
  Synthetic Peptide
DTTHTCPRCPEPKSCDTPPPCPRCPEPKSCDTPPPCPRCPEPKSCDTPPPC

SEQ ID NO: 2887 - protein, 51 aa, Artificial Sequence
  Synthetic Peptide
TTHTCPRCPEPKSCDTPPPCPRCPEPKSCDTPPPCPRCPEPKSCDTPPPCP

SEQ ID NO: 2888 - protein, 51 aa, Artificial Sequence
  Synthetic Peptide
THTCPRCPEPKSCDTPPPCPRCPEPKSCDTPPPCPRCPEPKSCDTPPPCPR

SEQ ID NO: 2889 - protein, 51 aa, Artificial Sequence
  Synthetic Peptide
HTCPRCPEPKSCDTPPPCPRCPEPKSCDTPPPCPRCPEPKSCDTPPPCPRC

SEQ ID NO: 2890 - protein, 51 aa, Artificial Sequence
  Synthetic Peptide
TCPRCPEPKSCDTPPPCPRCPEPKSCDTPPPCPRCPEPKSCDTPPPCPRCP

SEQ ID NO: 2891 - protein, 50 aa, Artificial Sequence
  Synthetic Peptide
ELKTPLGDTTHTCPRCPEPKSCDTPPPCPRCPEPKSCDTPPPCPRCPEPK

SEQ ID NO: 2892 - protein, 50 aa, Artificial Sequence
  Synthetic Peptide
LKTPLGDTTHTCPRCPEPKSCDTPPPCPRCPEPKSCDTPPPCPRCPEPKS

SEQ ID NO: 2893 - protein, 50 aa, Artificial Sequence
  Synthetic Peptide
KTPLGDTTHTCPRCPEPKSCDTPPPCPRCPEPKSCDTPPPCPRCPEPKSC

SEQ ID NO: 2894 - protein, 50 aa, Artificial Sequence
  Synthetic Peptide
TPLGDTTHTCPRCPEPKSCDTPPPCPRCPEPKSCDTPPPCPRCPEPKSCD

SEQ ID NO: 2895 - protein, 50 aa, Artificial Sequence
  Synthetic Peptide
PLGDTTHTCPRCPEPKSCDTPPPCPRCPEPKSCDTPPPCPRCPEPKSCDT

SEQ ID NO: 2896 - protein, 50 aa, Artificial Sequence
  Synthetic Peptide
LGDTTHTCPRCPEPKSCDTPPPCPRCPEPKSCDTPPPCPRCPEPKSCDTP

SEQ ID NO: 2897 - protein, 50 aa, Artificial Sequence
  Synthetic Peptide
GDTTHTCPRCPEPKSCDTPPPCPRCPEPKSCDTPPPCPRCPEPKSCDTPP

SEQ ID NO: 2898 - protein, 50 aa, Artificial Sequence
  Synthetic Peptide
DTTHTCPRCPEPKSCDTPPPCPRCPEPKSCDTPPPCPRCPEPKSCDTPPP

SEQ ID NO: 2899 - protein, 50 aa, Artificial Sequence
  Synthetic Peptide
TTHTCPRCPEPKSCDTPPPCPRCPEPKSCDTPPPCPRCPEPKSCDTPPPC

SEQ ID NO: 2900 - protein, 50 aa, Artificial Sequence
  Synthetic Peptide
THTCPRCPEPKSCDTPPPCPRCPEPKSCDTPPPCPRCPEPKSCDTPPPCP

SEQ ID NO: 2901 - protein, 50 aa, Artificial Sequence
  Synthetic Peptide
HTCPRCPEPKSCDTPPPCPRCPEPKSCDTPPPCPRCPEPKSCDTPPPCPR

SEQ ID NO: 2902 - protein, 50 aa, Artificial Sequence
  Synthetic Peptide
TCPRCPEPKSCDTPPPCPRCPEPKSCDTPPPCPRCPEPKSCDTPPPCPRC

SEQ ID NO: 2903 - protein, 50 aa, Artificial Sequence
  Synthetic Peptide
CPRCPEPKSCDTPPPCPRCPEPKSCDTPPPCPRCPEPKSCDTPPPCPRCP

SEQ ID NO: 2904 - protein, 49 aa, Artificial Sequence
  Synthetic Peptide
ELKTPLGDTTHTCPRCPEPKSCDTPPPCPRCPEPKSCDTPPPCPRCPEP

SEQ ID NO: 2905 - protein, 49 aa, Artificial Sequence
  Synthetic Peptide
LKTPLGDTTHTCPRCPEPKSCDTPPPCPRCPEPKSCDTPPPCPRCPEPK

SEQ ID NO: 2906 - protein, 49 aa, Artificial Sequence
  Synthetic Peptide
KTPLGDTTHTCPRCPEPKSCDTPPPCPRCPEPKSCDTPPPCPRCPEPKS

SEQ ID NO: 2907 - protein, 49 aa, Artificial Sequence
  Synthetic Peptide
TPLGDTTHTCPRCPEPKSCDTPPPCPRCPEPKSCDTPPPCPRCPEPKSC

SEQ ID NO: 2908 - protein, 49 aa, Artificial Sequence
  Synthetic Peptide
PLGDTTHTCPRCPEPKSCDTPPPCPRCPEPKSCDTPPPCPRCPEPKSCD

SEQ ID NO: 2909 - protein, 49 aa, Artificial Sequence
  Synthetic Peptide
LGDTTHTCPRCPEPKSCDTPPPCPRCPEPKSCDTPPPCPRCPEPKSCDT

SEQ ID NO: 2910 - protein, 49 aa, Artificial Sequence
  Synthetic Peptide
GDTTHTCPRCPEPKSCDTPPPCPRCPEPKSCDTPPPCPRCPEPKSCDTP

SEQ ID NO: 2911 - protein, 49 aa, Artificial Sequence
  Synthetic Peptide
DTTHTCPRCPEPKSCDTPPPCPRCPEPKSCDTPPPCPRCPEPKSCDTPP

SEQ ID NO: 2912 - protein, 49 aa, Artificial Sequence
  Synthetic Peptide
TTHTCPRCPEPKSCDTPPPCPRCPEPKSCDTPPPCPRCPEPKSCDTPPP

SEQ ID NO: 2913 - protein, 49 aa, Artificial Sequence
  Synthetic Peptide
THTCPRCPEPKSCDTPPPCPRCPEPKSCDTPPPCPRCPEPKSCDTPPPC

SEQ ID NO: 2914 - protein, 49 aa, Artificial Sequence
  Synthetic Peptide
HTCPRCPEPKSCDTPPPCPRCPEPKSCDTPPPCPRCPEPKSCDTPPPCP

SEQ ID NO: 2915 - protein, 49 aa, Artificial Sequence
  Synthetic Peptide
TCPRCPEPKSCDTPPPCPRCPEPKSCDTPPPCPRCPEPKSCDTPPPCPR

SEQ ID NO: 2916 - protein, 49 aa, Artificial Sequence
  Synthetic Peptide
CPRCPEPKSCDTPPPCPRCPEPKSCDTPPPCPRCPEPKSCDTPPPCPRC

SEQ ID NO: 2917 - protein, 49 aa, Artificial Sequence
  Synthetic Peptide
PRCPEPKSCDTPPPCPRCPEPKSCDTPPPCPRCPEPKSCDTPPPCPRCP

SEQ ID NO: 2918 - protein, 48 aa, Artificial Sequence
  Synthetic Peptide
ELKTPLGDTTHTCPRCPEPKSCDTPPPCPRCPEPKSCDTPPPCPRCPE

SEQ ID NO: 2919 - protein, 48 aa, Artificial Sequence
  Synthetic Peptide
LKTPLGDTTHTCPRCPEPKSCDTPPPCPRCPEPKSCDTPPPCPRCPEP

SEQ ID NO: 2920 - protein, 48 aa, Artificial Sequence
  Synthetic Peptide
KTPLGDTTHTCPRCPEPKSCDTPPPCPRCPEPKSCDTPPPCPRCPEPK

SEQ ID NO: 2921 - protein, 48 aa, Artificial Sequence
  Synthetic Peptide
TPLGDTTHTCPRCPEPKSCDTPPPCPRCPEPKSCDTPPPCPRCPEPKS

SEQ ID NO: 2922 - protein, 48 aa, Artificial Sequence
  Synthetic Peptide
PLGDTTHTCPRCPEPKSCDTPPPCPRCPEPKSCDTPPPCPRCPEPKSC

SEQ ID NO: 2923 - protein, 48 aa, Artificial Sequence
  Synthetic Peptide
LGDTTHTCPRCPEPKSCDTPPPCPRCPEPKSCDTPPPCPRCPEPKSCD

SEQ ID NO: 2924 - protein, 48 aa, Artificial Sequence
  Synthetic Peptide
GDTTHTCPRCPEPKSCDTPPPCPRCPEPKSCDTPPPCPRCPEPKSCDT

SEQ ID NO: 2925 - protein, 48 aa, Artificial Sequence
  Synthetic Peptide
DTTHTCPRCPEPKSCDTPPPCPRCPEPKSCDTPPPCPRCPEPKSCDTP

SEQ ID NO: 2926 - protein, 48 aa, Artificial Sequence
  Synthetic Peptide
TTHTCPRCPEPKSCDTPPPCPRCPEPKSCDTPPPCPRCPEPKSCDTPP

SEQ ID NO: 2927 - protein, 48 aa, Artificial Sequence
  Synthetic Peptide
THTCPRCPEPKSCDTPPPCPRCPEPKSCDTPPPCPRCPEPKSCDTPPP

SEQ ID NO: 2928 - protein, 48 aa, Artificial Sequence
  Synthetic Peptide
HTCPRCPEPKSCDTPPPCPRCPEPKSCDTPPPCPRCPEPKSCDTPPPC

SEQ ID NO: 2929 - protein, 48 aa, Artificial Sequence
  Synthetic Peptide
TCPRCPEPKSCDTPPPCPRCPEPKSCDTPPPCPRCPEPKSCDTPPPCP

SEQ ID NO: 2930 - protein, 48 aa, Artificial Sequence
  Synthetic Peptide
CPRCPEPKSCDTPPPCPRCPEPKSCDTPPPCPRCPEPKSCDTPPPCPR

SEQ ID NO: 2931 - protein, 48 aa, Artificial Sequence
  Synthetic Peptide
PRCPEPKSCDTPPPCPRCPEPKSCDTPPPCPRCPEPKSCDTPPPCPRC

SEQ ID NO: 2932 - protein, 48 aa, Artificial Sequence
  Synthetic Peptide
RCPEPKSCDTPPPCPRCPEPKSCDTPPPCPRCPEPKSCDTPPPCPRCP

SEQ ID NO: 2933 - protein, 47 aa, Artificial Sequence
  Synthetic Peptide
ELKTPLGDTTHTCPRCPEPKSCDTPPPCPRCPEPKSCDTPPPCPRCP

SEQ ID NO: 2934 - protein, 47 aa, Artificial Sequence
  Synthetic Peptide
LKTPLGDTTHTCPRCPEPKSCDTPPPCPRCPEPKSCDTPPPCPRCPE

SEQ ID NO: 2935 - protein, 47 aa, Artificial Sequence
  Synthetic Peptide
KTPLGDTTHTCPRCPEPKSCDTPPPCPRCPEPKSCDTPPPCPRCPEP

SEQ ID NO: 2936 - protein, 47 aa, Artificial Sequence
  Synthetic Peptide
TPLGDTTHTCPRCPEPKSCDTPPPCPRCPEPKSCDTPPPCPRCPEPK

SEQ ID NO: 2937 - protein, 47 aa, Artificial Sequence
  Synthetic Peptide
PLGDTTHTCPRCPEPKSCDTPPPCPRCPEPKSCDTPPPCPRCPEPKS

SEQ ID NO: 2938 - protein, 47 aa, Artificial Sequence
  Synthetic Peptide
LGDTTHTCPRCPEPKSCDTPPPCPRCPEPKSCDTPPPCPRCPEPKSC

SEQ ID NO: 2939 - protein, 47 aa, Artificial Sequence
  Synthetic Peptide
GDTTHTCPRCPEPKSCDTPPPCPRCPEPKSCDTPPPCPRCPEPKSCD

SEQ ID NO: 2940 - protein, 47 aa, Artificial Sequence
  Synthetic Peptide
DTTHTCPRCPEPKSCDTPPPCPRCPEPKSCDTPPPCPRCPEPKSCDT

SEQ ID NO: 2941 - protein, 47 aa, Artificial Sequence
  Synthetic Peptide
TTHTCPRCPEPKSCDTPPPCPRCPEPKSCDTPPPCPRCPEPKSCDTP

SEQ ID NO: 2942 - protein, 47 aa, Artificial Sequence
  Synthetic Peptide
THTCPRCPEPKSCDTPPPCPRCPEPKSCDTPPPCPRCPEPKSCDTPP

SEQ ID NO: 2943 - protein, 47 aa, Artificial Sequence
  Synthetic Peptide
HTCPRCPEPKSCDTPPPCPRCPEPKSCDTPPPCPRCPEPKSCDTPPP

SEQ ID NO: 2944 - protein, 47 aa, Artificial Sequence
  Synthetic Peptide
TCPRCPEPKSCDTPPPCPRCPEPKSCDTPPPCPRCPEPKSCDTPPPC

SEQ ID NO: 2945 - protein, 47 aa, Artificial Sequence
  Synthetic Peptide
CPRCPEPKSCDTPPPCPRCPEPKSCDTPPPCPRCPEPKSCDTPPPCP

SEQ ID NO: 2946 - protein, 47 aa, Artificial Sequence
  Synthetic Peptide
PRCPEPKSCDTPPPCPRCPEPKSCDTPPPCPRCPEPKSCDTPPPCPR

SEQ ID NO: 2947 - protein, 47 aa, Artificial Sequence
  Synthetic Peptide
RCPEPKSCDTPPPCPRCPEPKSCDTPPPCPRCPEPKSCDTPPPCPRC

SEQ ID NO: 2948 - protein, 47 aa, Artificial Sequence
  Synthetic Peptide
CPEPKSCDTPPPCPRCPEPKSCDTPPPCPRCPEPKSCDTPPPCPRCP

SEQ ID NO: 2949 - protein, 46 aa, Artificial Sequence
  Synthetic Peptide
ELKTPLGDTTHTCPRCPEPKSCDTPPPCPRCPEPKSCDTPPPCPRC

SEQ ID NO: 2950 - protein, 46 aa, Artificial Sequence
  Synthetic Peptide
LKTPLGDTTHTCPRCPEPKSCDTPPPCPRCPEPKSCDTPPPCPRCP

SEQ ID NO: 2951 - protein, 46 aa, Artificial Sequence
  Synthetic Peptide
KTPLGDTTHTCPRCPEPKSCDTPPPCPRCPEPKSCDTPPPCPRCPE

SEQ ID NO: 2952 - protein, 46 aa, Artificial Sequence
  Synthetic Peptide
TPLGDTTHTCPRCPEPKSCDTPPPCPRCPEPKSCDTPPPCPRCPEP

SEQ ID NO: 2953 - protein, 46 aa, Artificial Sequence
  Synthetic Peptide
PLGDTTHTCPRCPEPKSCDTPPPCPRCPEPKSCDTPPPCPRCPEPK

SEQ ID NO: 2954 - protein, 46 aa, Artificial Sequence
  Synthetic Peptide
LGDTTHTCPRCPEPKSCDTPPPCPRCPEPKSCDTPPPCPRCPEPKS

SEQ ID NO: 2955 - protein, 46 aa, Artificial Sequence
  Synthetic Peptide
GDTTHTCPRCPEPKSCDTPPPCPRCPEPKSCDTPPPCPRCPEPKSC

SEQ ID NO: 2956 - protein, 46 aa, Artificial Sequence
  Synthetic Peptide
DTTHTCPRCPEPKSCDTPPPCPRCPEPKSCDTPPPCPRCPEPKSCD

SEQ ID NO: 2957 - protein, 46 aa, Artificial Sequence
  Synthetic Peptide
TTHTCPRCPEPKSCDTPPPCPRCPEPKSCDTPPPCPRCPEPKSCDT

SEQ ID NO: 2958 - protein, 46 aa, Artificial Sequence
  Synthetic Peptide
THTCPRCPEPKSCDTPPPCPRCPEPKSCDTPPPCPRCPEPKSCDTP

SEQ ID NO: 2959 - protein, 46 aa, Artificial Sequence
  Synthetic Peptide
HTCPRCPEPKSCDTPPPCPRCPEPKSCDTPPPCPRCPEPKSCDTPP

SEQ ID NO: 2960 - protein, 46 aa, Artificial Sequence
  Synthetic Peptide
TCPRCPEPKSCDTPPPCPRCPEPKSCDTPPPCPRCPEPKSCDTPPP

SEQ ID NO: 2961 - protein, 46 aa, Artificial Sequence
  Synthetic Peptide
CPRCPEPKSCDTPPPCPRCPEPKSCDTPPPCPRCPEPKSCDTPPPC

SEQ ID NO: 2962 - protein, 46 aa, Artificial Sequence
  Synthetic Peptide
PRCPEPKSCDTPPPCPRCPEPKSCDTPPPCPRCPEPKSCDTPPPCP

SEQ ID NO: 2963 - protein, 46 aa, Artificial Sequence
  Synthetic Peptide
RCPEPKSCDTPPPCPRCPEPKSCDTPPPCPRCPEPKSCDTPPPCPR

SEQ ID NO: 2964 - protein, 46 aa, Artificial Sequence
  Synthetic Peptide
CPEPKSCDTPPPCPRCPEPKSCDTPPPCPRCPEPKSCDTPPPCPRC

SEQ ID NO: 2965 - protein, 46 aa, Artificial Sequence
  Synthetic Peptide
PEPKSCDTPPPCPRCPEPKSCDTPPPCPRCPEPKSCDTPPPCPRCP

SEQ ID NO: 2966 - protein, 45 aa, Artificial Sequence
  Synthetic Peptide
ELKTPLGDTTHTCPRCPEPKSCDTPPPCPRCPEPKSCDTPPPCPR

SEQ ID NO: 2967 - protein, 45 aa, Artificial Sequence
  Synthetic Peptide
LKTPLGDTTHTCPRCPEPKSCDTPPPCPRCPEPKSCDTPPPCPRC

SEQ ID NO: 2968 - protein, 45 aa, Artificial Sequence
  Synthetic Peptide
KTPLGDTTHTCPRCPEPKSCDTPPPCPRCPEPKSCDTPPPCPRCP

SEQ ID NO: 2969 - protein, 45 aa, Artificial Sequence
  Synthetic Peptide
TPLGDTTHTCPRCPEPKSCDTPPPCPRCPEPKSCDTPPPCPRCPE

SEQ ID NO: 2970 - protein, 45 aa, Artificial Sequence
  Synthetic Peptide
PLGDTTHTCPRCPEPKSCDTPPPCPRCPEPKSCDTPPPCPRCPEP

SEQ ID NO: 2971 - protein, 45 aa, Artificial Sequence
  Synthetic Peptide
LGDTTHTCPRCPEPKSCDTPPPCPRCPEPKSCDTPPPCPRCPEPK

SEQ ID NO: 2972 - protein, 45 aa, Artificial Sequence
  Synthetic Peptide
GDTTHTCPRCPEPKSCDTPPPCPRCPEPKSCDTPPPCPRCPEPKS

SEQ ID NO: 2973 - protein, 45 aa, Artificial Sequence
  Synthetic Peptide
DTTHTCPRCPEPKSCDTPPPCPRCPEPKSCDTPPPCPRCPEPKSC

SEQ ID NO: 2974 - protein, 45 aa, Artificial Sequence
  Synthetic Peptide
TTHTCPRCPEPKSCDTPPPCPRCPEPKSCDTPPPCPRCPEPKSCD

SEQ ID NO: 2975 - protein, 45 aa, Artificial Sequence
  Synthetic Peptide
THTCPRCPEPKSCDTPPPCPRCPEPKSCDTPPPCPRCPEPKSCDT

SEQ ID NO: 2976 - protein, 45 aa, Artificial Sequence
  Synthetic Peptide
HTCPRCPEPKSCDTPPPCPRCPEPKSCDTPPPCPRCPEPKSCDTP

SEQ ID NO: 2977 - protein, 45 aa, Artificial Sequence
  Synthetic Peptide
TCPRCPEPKSCDTPPPCPRCPEPKSCDTPPPCPRCPEPKSCDTPP

SEQ ID NO: 2978 - protein, 45 aa, Artificial Sequence
  Synthetic Peptide
CPRCPEPKSCDTPPPCPRCPEPKSCDTPPPCPRCPEPKSCDTPPP

SEQ ID NO: 2979 - protein, 45 aa, Artificial Sequence
  Synthetic Peptide
PRCPEPKSCDTPPPCPRCPEPKSCDTPPPCPRCPEPKSCDTPPPC

SEQ ID NO: 2980 - protein, 45 aa, Artificial Sequence
  Synthetic Peptide
RCPEPKSCDTPPPCPRCPEPKSCDTPPPCPRCPEPKSCDTPPPCP

SEQ ID NO: 2981 - protein, 45 aa, Artificial Sequence
  Synthetic Peptide
CPEPKSCDTPPPCPRCPEPKSCDTPPPCPRCPEPKSCDTPPPCPR

SEQ ID NO: 2982 - protein, 45 aa, Artificial Sequence
  Synthetic Peptide
PEPKSCDTPPPCPRCPEPKSCDTPPPCPRCPEPKSCDTPPPCPRC

SEQ ID NO: 2983 - protein, 45 aa, Artificial Sequence
  Synthetic Peptide
EPKSCDTPPPCPRCPEPKSCDTPPPCPRCPEPKSCDTPPPCPRCP

SEQ ID NO: 2984 - protein, 44 aa, Artificial Sequence
  Synthetic Peptide
ELKTPLGDTTHTCPRCPEPKSCDTPPPCPRCPEPKSCDTPPPCP

SEQ ID NO: 2985 - protein, 44 aa, Artificial Sequence
  Synthetic Peptide
LKTPLGDTTHTCPRCPEPKSCDTPPPCPRCPEPKSCDTPPPCPR

SEQ ID NO: 2986 - protein, 44 aa, Artificial Sequence
  Synthetic Peptide
KTPLGDTTHTCPRCPEPKSCDTPPPCPRCPEPKSCDTPPPCPRC

SEQ ID NO: 2987 - protein, 44 aa, Artificial Sequence
  Synthetic Peptide
TPLGDTTHTCPRCPEPKSCDTPPPCPRCPEPKSCDTPPPCPRCP

SEQ ID NO: 2988 - protein, 44 aa, Artificial Sequence
  Synthetic Peptide
PLGDTTHTCPRCPEPKSCDTPPPCPRCPEPKSCDTPPPCPRCPE

SEQ ID NO: 2989 - protein, 44 aa, Artificial Sequence
  Synthetic Peptide
LGDTTHTCPRCPEPKSCDTPPPCPRCPEPKSCDTPPPCPRCPEP

SEQ ID NO: 2990 - protein, 44 aa, Artificial Sequence
  Synthetic Peptide
GDTTHTCPRCPEPKSCDTPPPCPRCPEPKSCDTPPPCPRCPEPK

SEQ ID NO: 2991 - protein, 44 aa, Artificial Sequence
  Synthetic Peptide
DTTHTCPRCPEPKSCDTPPPCPRCPEPKSCDTPPPCPRCPEPKS

SEQ ID NO: 2992 - protein, 44 aa, Artificial Sequence
  Synthetic Peptide
TTHTCPRCPEPKSCDTPPPCPRCPEPKSCDTPPPCPRCPEPKSC

SEQ ID NO: 2993 - protein, 44 aa, Artificial Sequence
  Synthetic Peptide
THTCPRCPEPKSCDTPPPCPRCPEPKSCDTPPPCPRCPEPKSCD

SEQ ID NO: 2994 - protein, 44 aa, Artificial Sequence
  Synthetic Peptide
HTCPRCPEPKSCDTPPPCPRCPEPKSCDTPPPCPRCPEPKSCDT

SEQ ID NO: 2995 - protein, 44 aa, Artificial Sequence
  Synthetic Peptide
TCPRCPEPKSCDTPPPCPRCPEPKSCDTPPPCPRCPEPKSCDTP

SEQ ID NO: 2996 - protein, 44 aa, Artificial Sequence
  Synthetic Peptide
CPRCPEPKSCDTPPPCPRCPEPKSCDTPPPCPRCPEPKSCDTPP

SEQ ID NO: 2997 - protein, 44 aa, Artificial Sequence
  Synthetic Peptide
PRCPEPKSCDTPPPCPRCPEPKSCDTPPPCPRCPEPKSCDTPPP

SEQ ID NO: 2998 - protein, 44 aa, Artificial Sequence
  Synthetic Peptide
RCPEPKSCDTPPPCPRCPEPKSCDTPPPCPRCPEPKSCDTPPPC

SEQ ID NO: 2999 - protein, 44 aa, Artificial Sequence
  Synthetic Peptide
CPEPKSCDTPPPCPRCPEPKSCDTPPPCPRCPEPKSCDTPPPCP

SEQ ID NO: 3000 - protein, 44 aa, Artificial Sequence
  Synthetic Peptide
PEPKSCDTPPPCPRCPEPKSCDTPPPCPRCPEPKSCDTPPPCPR

SEQ ID NO: 3001 - protein, 44 aa, Artificial Sequence
  Synthetic Peptide
EPKSCDTPPPCPRCPEPKSCDTPPPCPRCPEPKSCDTPPPCPRC

SEQ ID NO: 3002 - protein, 44 aa, Artificial Sequence
  Synthetic Peptide
PKSCDTPPPCPRCPEPKSCDTPPPCPRCPEPKSCDTPPPCPRCP

SEQ ID NO: 3003 - protein, 43 aa, Artificial Sequence
  Synthetic Peptide
ELKTPLGDTTHTCPRCPEPKSCDTPPPCPRCPEPKSCDTPPPC

SEQ ID NO: 3004 - protein, 43 aa, Artificial Sequence
  Synthetic Peptide
LKTPLGDTTHTCPRCPEPKSCDTPPPCPRCPEPKSCDTPPPCP

SEQ ID NO: 3005 - protein, 43 aa, Artificial Sequence
  Synthetic Peptide
KTPLGDTTHTCPRCPEPKSCDTPPPCPRCPEPKSCDTPPPCPR

SEQ ID NO: 3006 - protein, 43 aa, Artificial Sequence
  Synthetic Peptide
TPLGDTTHTCPRCPEPKSCDTPPPCPRCPEPKSCDTPPPCPRC

SEQ ID NO: 3007 - protein, 43 aa, Artificial Sequence
  Synthetic Peptide
PLGDTTHTCPRCPEPKSCDTPPPCPRCPEPKSCDTPPPCPRCP

SEQ ID NO: 3008 - protein, 43 aa, Artificial Sequence
  Synthetic Peptide
LGDTTHTCPRCPEPKSCDTPPPCPRCPEPKSCDTPPPCPRCPE

SEQ ID NO: 3009 - protein, 43 aa, Artificial Sequence
  Synthetic Peptide
GDTTHTCPRCPEPKSCDTPPPCPRCPEPKSCDTPPPCPRCPEP

SEQ ID NO: 3010 - protein, 43 aa, Artificial Sequence
  Synthetic Peptide
DTTHTCPRCPEPKSCDTPPPCPRCPEPKSCDTPPPCPRCPEPK

SEQ ID NO: 3011 - protein, 43 aa, Artificial Sequence
  Synthetic Peptide
TTHTCPRCPEPKSCDTPPPCPRCPEPKSCDTPPPCPRCPEPKS

SEQ ID NO: 3012 - protein, 43 aa, Artificial Sequence
  Synthetic Peptide
THTCPRCPEPKSCDTPPPCPRCPEPKSCDTPPPCPRCPEPKSC

SEQ ID NO: 3013 - protein, 43 aa, Artificial Sequence
  Synthetic Peptide
HTCPRCPEPKSCDTPPPCPRCPEPKSCDTPPPCPRCPEPKSCD

SEQ ID NO: 3014 - protein, 43 aa, Artificial Sequence
  Synthetic Peptide
TCPRCPEPKSCDTPPPCPRCPEPKSCDTPPPCPRCPEPKSCDT

SEQ ID NO: 3015 - protein, 43 aa, Artificial Sequence
  Synthetic Peptide
CPRCPEPKSCDTPPPCPRCPEPKSCDTPPPCPRCPEPKSCDTP

SEQ ID NO: 3016 - protein, 43 aa, Artificial Sequence
  Synthetic Peptide
PRCPEPKSCDTPPPCPRCPEPKSCDTPPPCPRCPEPKSCDTPP

SEQ ID NO: 3017 - protein, 43 aa, Artificial Sequence
  Synthetic Peptide
RCPEPKSCDTPPPCPRCPEPKSCDTPPPCPRCPEPKSCDTPPP

SEQ ID NO: 3018 - protein, 43 aa, Artificial Sequence
  Synthetic Peptide
CPEPKSCDTPPPCPRCPEPKSCDTPPPCPRCPEPKSCDTPPPC

SEQ ID NO: 3019 - protein, 43 aa, Artificial Sequence
  Synthetic Peptide
PEPKSCDTPPPCPRCPEPKSCDTPPPCPRCPEPKSCDTPPPCP

SEQ ID NO: 3020 - protein, 43 aa, Artificial Sequence
  Synthetic Peptide
EPKSCDTPPPCPRCPEPKSCDTPPPCPRCPEPKSCDTPPPCPR

SEQ ID NO: 3021 - protein, 43 aa, Artificial Sequence
  Synthetic Peptide
PKSCDTPPPCPRCPEPKSCDTPPPCPRCPEPKSCDTPPPCPRC

SEQ ID NO: 3022 - protein, 43 aa, Artificial Sequence
  Synthetic Peptide
KSCDTPPPCPRCPEPKSCDTPPPCPRCPEPKSCDTPPPCPRCP

SEQ ID NO: 3023 - protein, 42 aa, Artificial Sequence
  Synthetic Peptide
ELKTPLGDTTHTCPRCPEPKSCDTPPPCPRCPEPKSCDTPPP

SEQ ID NO: 3024 - protein, 42 aa, Artificial Sequence
  Synthetic Peptide
LKTPLGDTTHTCPRCPEPKSCDTPPPCPRCPEPKSCDTPPPC

SEQ ID NO: 3025 - protein, 42 aa, Artificial Sequence
  Synthetic Peptide
KTPLGDTTHTCPRCPEPKSCDTPPPCPRCPEPKSCDTPPPCP

SEQ ID NO: 3026 - protein, 42 aa, Artificial Sequence
  Synthetic Peptide
TPLGDTTHTCPRCPEPKSCDTPPPCPRCPEPKSCDTPPPCPR

SEQ ID NO: 3027 - protein, 42 aa, Artificial Sequence
  Synthetic Peptide
PLGDTTHTCPRCPEPKSCDTPPPCPRCPEPKSCDTPPPCPRC

SEQ ID NO: 3028 - protein, 42 aa, Artificial Sequence
  Synthetic Peptide
LGDTTHTCPRCPEPKSCDTPPPCPRCPEPKSCDTPPPCPRCP

SEQ ID NO: 3029 - protein, 42 aa, Artificial Sequence
  Synthetic Peptide
GDTTHTCPRCPEPKSCDTPPPCPRCPEPKSCDTPPPCPRCPE

SEQ ID NO: 3030 - protein, 42 aa, Artificial Sequence
  Synthetic Peptide
DTTHTCPRCPEPKSCDTPPPCPRCPEPKSCDTPPPCPRCPEP

SEQ ID NO: 3031 - protein, 42 aa, Artificial Sequence
  Synthetic Peptide
TTHTCPRCPEPKSCDTPPPCPRCPEPKSCDTPPPCPRCPEPK

SEQ ID NO: 3032 - protein, 42 aa, Artificial Sequence
  Synthetic Peptide
THTCPRCPEPKSCDTPPPCPRCPEPKSCDTPPPCPRCPEPKS

SEQ ID NO: 3033 - protein, 42 aa, Artificial Sequence
  Synthetic Peptide
HTCPRCPEPKSCDTPPPCPRCPEPKSCDTPPPCPRCPEPKSC

SEQ ID NO: 3034 - protein, 42 aa, Artificial Sequence
  Synthetic Peptide
TCPRCPEPKSCDTPPPCPRCPEPKSCDTPPPCPRCPEPKSCD

SEQ ID NO: 3035 - protein, 42 aa, Artificial Sequence
  Synthetic Peptide
CPRCPEPKSCDTPPPCPRCPEPKSCDTPPPCPRCPEPKSCDT

SEQ ID NO: 3036 - protein, 42 aa, Artificial Sequence
  Synthetic Peptide
PRCPEPKSCDTPPPCPRCPEPKSCDTPPPCPRCPEPKSCDTP

SEQ ID NO: 3037 - protein, 42 aa, Artificial Sequence
  Synthetic Peptide
RCPEPKSCDTPPPCPRCPEPKSCDTPPPCPRCPEPKSCDTPP

SEQ ID NO: 3038 - protein, 42 aa, Artificial Sequence
  Synthetic Peptide
CPEPKSCDTPPPCPRCPEPKSCDTPPPCPRCPEPKSCDTPPP

SEQ ID NO: 3039 - protein, 42 aa, Artificial Sequence
  Synthetic Peptide
PEPKSCDTPPPCPRCPEPKSCDTPPPCPRCPEPKSCDTPPPC

SEQ ID NO: 3040 - protein, 42 aa, Artificial Sequence
  Synthetic Peptide
EPKSCDTPPPCPRCPEPKSCDTPPPCPRCPEPKSCDTPPPCP

SEQ ID NO: 3041 - protein, 42 aa, Artificial Sequence
  Synthetic Peptide
PKSCDTPPPCPRCPEPKSCDTPPPCPRCPEPKSCDTPPPCPR

SEQ ID NO: 3042 - protein, 42 aa, Artificial Sequence
  Synthetic Peptide
KSCDTPPPCPRCPEPKSCDTPPPCPRCPEPKSCDTPPPCPRC

SEQ ID NO: 3043 - protein, 42 aa, Artificial Sequence
  Synthetic Peptide
SCDTPPPCPRCPEPKSCDTPPPCPRCPEPKSCDTPPPCPRCP

SEQ ID NO: 3044 - protein, 41 aa, Artificial Sequence
  Synthetic Peptide
ELKTPLGDTTHTCPRCPEPKSCDTPPPCPRCPEPKSCDTPP

SEQ ID NO: 3045 - protein, 41 aa, Artificial Sequence
  Synthetic Peptide
LKTPLGDTTHTCPRCPEPKSCDTPPPCPRCPEPKSCDTPPP

SEQ ID NO: 3046 - protein, 41 aa, Artificial Sequence
  Synthetic Peptide
KTPLGDTTHTCPRCPEPKSCDTPPPCPRCPEPKSCDTPPPC

SEQ ID NO: 3047 - protein, 41 aa, Artificial Sequence
  Synthetic Peptide
TPLGDTTHTCPRCPEPKSCDTPPPCPRCPEPKSCDTPPPCP

SEQ ID NO: 3048 - protein, 41 aa, Artificial Sequence
  Synthetic Peptide
PLGDTTHTCPRCPEPKSCDTPPPCPRCPEPKSCDTPPPCPR

SEQ ID NO: 3049 - protein, 41 aa, Artificial Sequence
  Synthetic Peptide
LGDTTHTCPRCPEPKSCDTPPPCPRCPEPKSCDTPPPCPRC

SEQ ID NO: 3050 - protein, 41 aa, Artificial Sequence
  Synthetic Peptide
GDTTHTCPRCPEPKSCDTPPPCPRCPEPKSCDTPPPCPRCP

SEQ ID NO: 3051 - protein, 41 aa, Artificial Sequence
  Synthetic Peptide
DTTHTCPRCPEPKSCDTPPPCPRCPEPKSCDTPPPCPRCPE

SEQ ID NO: 3052 - protein, 41 aa, Artificial Sequence
  Synthetic Peptide
TTHTCPRCPEPKSCDTPPPCPRCPEPKSCDTPPPCPRCPEP

SEQ ID NO: 3053 - protein, 41 aa, Artificial Sequence
  Synthetic Peptide
THTCPRCPEPKSCDTPPPCPRCPEPKSCDTPPPCPRCPEPK

SEQ ID NO: 3054 - protein, 41 aa, Artificial Sequence
  Synthetic Peptide
HTCPRCPEPKSCDTPPPCPRCPEPKSCDTPPPCPRCPEPKS

SEQ ID NO: 3055 - protein, 41 aa, Artificial Sequence
  Synthetic Peptide
TCPRCPEPKSCDTPPPCPRCPEPKSCDTPPPCPRCPEPKSC

SEQ ID NO: 3056 - protein, 41 aa, Artificial Sequence
  Synthetic Peptide
CPRCPEPKSCDTPPPCPRCPEPKSCDTPPPCPRCPEPKSCD

SEQ ID NO: 3057 - protein, 41 aa, Artificial Sequence
  Synthetic Peptide
PRCPEPKSCDTPPPCPRCPEPKSCDTPPPCPRCPEPKSCDT

SEQ ID NO: 3058 - protein, 41 aa, Artificial Sequence
  Synthetic Peptide
RCPEPKSCDTPPPCPRCPEPKSCDTPPPCPRCPEPKSCDTP

SEQ ID NO: 3059 - protein, 41 aa, Artificial Sequence
  Synthetic Peptide
CPEPKSCDTPPPCPRCPEPKSCDTPPPCPRCPEPKSCDTPP

SEQ ID NO: 3060 - protein, 41 aa, Artificial Sequence
  Synthetic Peptide
PEPKSCDTPPPCPRCPEPKSCDTPPPCPRCPEPKSCDTPPP

SEQ ID NO: 3061 - protein, 41 aa, Artificial Sequence
  Synthetic Peptide
EPKSCDTPPPCPRCPEPKSCDTPPPCPRCPEPKSCDTPPPC

SEQ ID NO: 3062 - protein, 41 aa, Artificial Sequence
  Synthetic Peptide
PKSCDTPPPCPRCPEPKSCDTPPPCPRCPEPKSCDTPPPCP

SEQ ID NO: 3063 - protein, 41 aa, Artificial Sequence
  Synthetic Peptide
KSCDTPPPCPRCPEPKSCDTPPPCPRCPEPKSCDTPPPCPR

SEQ ID NO: 3064 - protein, 41 aa, Artificial Sequence
  Synthetic Peptide
SCDTPPPCPRCPEPKSCDTPPPCPRCPEPKSCDTPPPCPRC

SEQ ID NO: 3065 - protein, 41 aa, Artificial Sequence
  Synthetic Peptide
CDTPPPCPRCPEPKSCDTPPPCPRCPEPKSCDTPPPCPRCP

SEQ ID NO: 3066 - protein, 40 aa, Artificial Sequence
  Synthetic Peptide
ELKTPLGDTTHTCPRCPEPKSCDTPPPCPRCPEPKSCDTP

SEQ ID NO: 3067 - protein, 40 aa, Artificial Sequence
  Synthetic Peptide
LKTPLGDTTHTCPRCPEPKSCDTPPPCPRCPEPKSCDTPP

SEQ ID NO: 3068 - protein, 40 aa, Artificial Sequence
  Synthetic Peptide
KTPLGDTTHTCPRCPEPKSCDTPPPCPRCPEPKSCDTPPP

SEQ ID NO: 3069 - protein, 40 aa, Artificial Sequence
  Synthetic Peptide
TPLGDTTHTCPRCPEPKSCDTPPPCPRCPEPKSCDTPPPC

SEQ ID NO: 3070 - protein, 40 aa, Artificial Sequence
  Synthetic Peptide
PLGDTTHTCPRCPEPKSCDTPPPCPRCPEPKSCDTPPPCP

SEQ ID NO: 3071 - protein, 40 aa, Artificial Sequence
  Synthetic Peptide
LGDTTHTCPRCPEPKSCDTPPPCPRCPEPKSCDTPPPCPR

SEQ ID NO: 3072 - protein, 40 aa, Artificial Sequence
  Synthetic Peptide
GDTTHTCPRCPEPKSCDTPPPCPRCPEPKSCDTPPPCPRC

SEQ ID NO: 3073 - protein, 40 aa, Artificial Sequence
  Synthetic Peptide
DTTHTCPRCPEPKSCDTPPPCPRCPEPKSCDTPPPCPRCP

SEQ ID NO: 3074 - protein, 40 aa, Artificial Sequence
  Synthetic Peptide
TTHTCPRCPEPKSCDTPPPCPRCPEPKSCDTPPPCPRCPE

SEQ ID NO: 3075 - protein, 40 aa, Artificial Sequence
  Synthetic Peptide
THTCPRCPEPKSCDTPPPCPRCPEPKSCDTPPPCPRCPEP

SEQ ID NO: 3076 - protein, 40 aa, Artificial Sequence
  Synthetic Peptide
HTCPRCPEPKSCDTPPPCPRCPEPKSCDTPPPCPRCPEPK

SEQ ID NO: 3077 - protein, 40 aa, Artificial Sequence
  Synthetic Peptide
TCPRCPEPKSCDTPPPCPRCPEPKSCDTPPPCPRCPEPKS

SEQ ID NO: 3078 - protein, 40 aa, Artificial Sequence
  Synthetic Peptide
CPRCPEPKSCDTPPPCPRCPEPKSCDTPPPCPRCPEPKSC

SEQ ID NO: 3079 - protein, 40 aa, Artificial Sequence
  Synthetic Peptide
PRCPEPKSCDTPPPCPRCPEPKSCDTPPPCPRCPEPKSCD

SEQ ID NO: 3080 - protein, 40 aa, Artificial Sequence
  Synthetic Peptide
RCPEPKSCDTPPPCPRCPEPKSCDTPPPCPRCPEPKSCDT

SEQ ID NO: 3081 - protein, 40 aa, Artificial Sequence
  Synthetic Peptide
CPEPKSCDTPPPCPRCPEPKSCDTPPPCPRCPEPKSCDTP

SEQ ID NO: 3082 - protein, 40 aa, Artificial Sequence
  Synthetic Peptide
PEPKSCDTPPPCPRCPEPKSCDTPPPCPRCPEPKSCDTPP

SEQ ID NO: 3083 - protein, 40 aa, Artificial Sequence
  Synthetic Peptide
EPKSCDTPPPCPRCPEPKSCDTPPPCPRCPEPKSCDTPPP

SEQ ID NO: 3084 - protein, 40 aa, Artificial Sequence
  Synthetic Peptide
PKSCDTPPPCPRCPEPKSCDTPPPCPRCPEPKSCDTPPPC

SEQ ID NO: 3085 - protein, 40 aa, Artificial Sequence
  Synthetic Peptide
KSCDTPPPCPRCPEPKSCDTPPPCPRCPEPKSCDTPPPCP

SEQ ID NO: 3086 - protein, 40 aa, Artificial Sequence
  Synthetic Peptide
SCDTPPPCPRCPEPKSCDTPPPCPRCPEPKSCDTPPPCPR

SEQ ID NO: 3087 - protein, 40 aa, Artificial Sequence
  Synthetic Peptide
CDTPPPCPRCPEPKSCDTPPPCPRCPEPKSCDTPPPCPRC

SEQ ID NO: 3088 - protein, 40 aa, Artificial Sequence
  Synthetic Peptide
DTPPPCPRCPEPKSCDTPPPCPRCPEPKSCDTPPPCPRCP

SEQ ID NO: 3089 - protein, 39 aa, Artificial Sequence
  Synthetic Peptide
ELKTPLGDTTHTCPRCPEPKSCDTPPPCPRCPEPKSCDT

SEQ ID NO: 3090 - protein, 39 aa, Artificial Sequence
  Synthetic Peptide
LKTPLGDTTHTCPRCPEPKSCDTPPPCPRCPEPKSCDTP

SEQ ID NO: 3091 - protein, 39 aa, Artificial Sequence
  Synthetic Peptide
KTPLGDTTHTCPRCPEPKSCDTPPPCPRCPEPKSCDTPP

SEQ ID NO: 3092 - protein, 39 aa, Artificial Sequence
  Synthetic Peptide
TPLGDTTHTCPRCPEPKSCDTPPPCPRCPEPKSCDTPPP

SEQ ID NO: 3093 - protein, 39 aa, Artificial Sequence
  Synthetic Peptide
PLGDTTHTCPRCPEPKSCDTPPPCPRCPEPKSCDTPPPC

SEQ ID NO: 3094 - protein, 39 aa, Artificial Sequence
  Synthetic Peptide
LGDTTHTCPRCPEPKSCDTPPPCPRCPEPKSCDTPPPCP

SEQ ID NO: 3095 - protein, 39 aa, Artificial Sequence
  Synthetic Peptide
GDTTHTCPRCPEPKSCDTPPPCPRCPEPKSCDTPPPCPR

SEQ ID NO: 3096 - protein, 39 aa, Artificial Sequence
  Synthetic Peptide
DTTHTCPRCPEPKSCDTPPPCPRCPEPKSCDTPPPCPRC

SEQ ID NO: 3097 - protein, 39 aa, Artificial Sequence
  Synthetic Peptide
TTHTCPRCPEPKSCDTPPPCPRCPEPKSCDTPPPCPRCP

SEQ ID NO: 3098 - protein, 39 aa, Artificial Sequence
  Synthetic Peptide
THTCPRCPEPKSCDTPPPCPRCPEPKSCDTPPPCPRCPE

SEQ ID NO: 3099 - protein, 39 aa, Artificial Sequence
  Synthetic Peptide
HTCPRCPEPKSCDTPPPCPRCPEPKSCDTPPPCPRCPEP

SEQ ID NO: 3100 - protein, 39 aa, Artificial Sequence
  Synthetic Peptide
TCPRCPEPKSCDTPPPCPRCPEPKSCDTPPPCPRCPEPK

SEQ ID NO: 3101 - protein, 39 aa, Artificial Sequence
  Synthetic Peptide
CPRCPEPKSCDTPPPCPRCPEPKSCDTPPPCPRCPEPKS

SEQ ID NO: 3102 - protein, 39 aa, Artificial Sequence
  Synthetic Peptide
PRCPEPKSCDTPPPCPRCPEPKSCDTPPPCPRCPEPKSC

SEQ ID NO: 3103 - protein, 39 aa, Artificial Sequence
  Synthetic Peptide
RCPEPKSCDTPPPCPRCPEPKSCDTPPPCPRCPEPKSCD

SEQ ID NO: 3104 - protein, 39 aa, Artificial Sequence
  Synthetic Peptide
CPEPKSCDTPPPCPRCPEPKSCDTPPPCPRCPEPKSCDT

SEQ ID NO: 3105 - protein, 39 aa, Artificial Sequence
  Synthetic Peptide
PEPKSCDTPPPCPRCPEPKSCDTPPPCPRCPEPKSCDTP

SEQ ID NO: 3106 - protein, 39 aa, Artificial Sequence
  Synthetic Peptide
EPKSCDTPPPCPRCPEPKSCDTPPPCPRCPEPKSCDTPP

SEQ ID NO: 3107 - protein, 39 aa, Artificial Sequence
  Synthetic Peptide
PKSCDTPPPCPRCPEPKSCDTPPPCPRCPEPKSCDTPPP

SEQ ID NO: 3108 - protein, 39 aa, Artificial Sequence
  Synthetic Peptide
KSCDTPPPCPRCPEPKSCDTPPPCPRCPEPKSCDTPPPC

SEQ ID NO: 3109 - protein, 39 aa, Artificial Sequence
  Synthetic Peptide
SCDTPPPCPRCPEPKSCDTPPPCPRCPEPKSCDTPPPCP

SEQ ID NO: 3110 - protein, 39 aa, Artificial Sequence
  Synthetic Peptide
CDTPPPCPRCPEPKSCDTPPPCPRCPEPKSCDTPPPCPR

SEQ ID NO: 3111 - protein, 39 aa, Artificial Sequence
  Synthetic Peptide
DTPPPCPRCPEPKSCDTPPPCPRCPEPKSCDTPPPCPRC

SEQ ID NO: 3112 - protein, 39 aa, Artificial Sequence
  Synthetic Peptide
TPPPCPRCPEPKSCDTPPPCPRCPEPKSCDTPPPCPRCP

SEQ ID NO: 3113 - protein, 38 aa, Artificial Sequence
  Synthetic Peptide
ELKTPLGDTTHTCPRCPEPKSCDTPPPCPRCPEPKSCD

SEQ ID NO: 3114 - protein, 38 aa, Artificial Sequence
  Synthetic Peptide
LKTPLGDTTHTCPRCPEPKSCDTPPPCPRCPEPKSCDT

SEQ ID NO: 3115 - protein, 38 aa, Artificial Sequence
  Synthetic Peptide
KTPLGDTTHTCPRCPEPKSCDTPPPCPRCPEPKSCDTP

SEQ ID NO: 3116 - protein, 38 aa, Artificial Sequence
  Synthetic Peptide
TPLGDTTHTCPRCPEPKSCDTPPPCPRCPEPKSCDTPP

SEQ ID NO: 3117 - protein, 38 aa, Artificial Sequence
  Synthetic Peptide
PLGDTTHTCPRCPEPKSCDTPPPCPRCPEPKSCDTPPP

SEQ ID NO: 3118 - protein, 38 aa, Artificial Sequence
  Synthetic Peptide
LGDTTHTCPRCPEPKSCDTPPPCPRCPEPKSCDTPPPC

SEQ ID NO: 3119 - protein, 38 aa, Artificial Sequence
  Synthetic Peptide
GDTTHTCPRCPEPKSCDTPPPCPRCPEPKSCDTPPPCP

SEQ ID NO: 3120 - protein, 38 aa, Artificial Sequence
  Synthetic Peptide
DTTHTCPRCPEPKSCDTPPPCPRCPEPKSCDTPPPCPR

SEQ ID NO: 3121 - protein, 38 aa, Artificial Sequence
  Synthetic Peptide
TTHTCPRCPEPKSCDTPPPCPRCPEPKSCDTPPPCPRC

SEQ ID NO: 3122 - protein, 38 aa, Artificial Sequence
  Synthetic Peptide
THTCPRCPEPKSCDTPPPCPRCPEPKSCDTPPPCPRCP

SEQ ID NO: 3123 - protein, 38 aa, Artificial Sequence
  Synthetic Peptide
HTCPRCPEPKSCDTPPPCPRCPEPKSCDTPPPCPRCPE

SEQ ID NO: 3124 - protein, 38 aa, Artificial Sequence
  Synthetic Peptide
TCPRCPEPKSCDTPPPCPRCPEPKSCDTPPPCPRCPEP

SEQ ID NO: 3125 - protein, 38 aa, Artificial Sequence
  Synthetic Peptide
CPRCPEPKSCDTPPPCPRCPEPKSCDTPPPCPRCPEPK

SEQ ID NO: 3126 - protein, 38 aa, Artificial Sequence
  Synthetic Peptide
PRCPEPKSCDTPPPCPRCPEPKSCDTPPPCPRCPEPKS

SEQ ID NO: 3127 - protein, 38 aa, Artificial Sequence
  Synthetic Peptide
RCPEPKSCDTPPPCPRCPEPKSCDTPPPCPRCPEPKSC

SEQ ID NO: 3128 - protein, 38 aa, Artificial Sequence
  Synthetic Peptide
CPEPKSCDTPPPCPRCPEPKSCDTPPPCPRCPEPKSCD

SEQ ID NO: 3129 - protein, 38 aa, Artificial Sequence
  Synthetic Peptide
PEPKSCDTPPPCPRCPEPKSCDTPPPCPRCPEPKSCDT

SEQ ID NO: 3130 - protein, 38 aa, Artificial Sequence
  Synthetic Peptide
EPKSCDTPPPCPRCPEPKSCDTPPPCPRCPEPKSCDTP

SEQ ID NO: 3131 - protein, 38 aa, Artificial Sequence
  Synthetic Peptide
PKSCDTPPPCPRCPEPKSCDTPPPCPRCPEPKSCDTPP

SEQ ID NO: 3132 - protein, 38 aa, Artificial Sequence
  Synthetic Peptide
KSCDTPPPCPRCPEPKSCDTPPPCPRCPEPKSCDTPPP

SEQ ID NO: 3133 - protein, 38 aa, Artificial Sequence
  Synthetic Peptide
SCDTPPPCPRCPEPKSCDTPPPCPRCPEPKSCDTPPPC

SEQ ID NO: 3134 - protein, 38 aa, Artificial Sequence
  Synthetic Peptide
CDTPPPCPRCPEPKSCDTPPPCPRCPEPKSCDTPPPCP

SEQ ID NO: 3135 - protein, 38 aa, Artificial Sequence
  Synthetic Peptide
DTPPPCPRCPEPKSCDTPPPCPRCPEPKSCDTPPPCPR

SEQ ID NO: 3136 - protein, 38 aa, Artificial Sequence
  Synthetic Peptide
TPPPCPRCPEPKSCDTPPPCPRCPEPKSCDTPPPCPRC

SEQ ID NO: 3137 - protein, 38 aa, Artificial Sequence
  Synthetic Peptide
PPPCPRCPEPKSCDTPPPCPRCPEPKSCDTPPPCPRCP

SEQ ID NO: 3138 - protein, 37 aa, Artificial Sequence
  Synthetic Peptide
ELKTPLGDTTHTCPRCPEPKSCDTPPPCPRCPEPKSC

SEQ ID NO: 3139 - protein, 37 aa, Artificial Sequence
  Synthetic Peptide
LKTPLGDTTHTCPRCPEPKSCDTPPPCPRCPEPKSCD

SEQ ID NO: 3140 - protein, 37 aa, Artificial Sequence
  Synthetic Peptide
KTPLGDTTHTCPRCPEPKSCDTPPPCPRCPEPKSCDT

SEQ ID NO: 3141 - protein, 37 aa, Artificial Sequence
  Synthetic Peptide
TPLGDTTHTCPRCPEPKSCDTPPPCPRCPEPKSCDTP

SEQ ID NO: 3142 - protein, 37 aa, Artificial Sequence
  Synthetic Peptide
PLGDTTHTCPRCPEPKSCDTPPPCPRCPEPKSCDTPP

SEQ ID NO: 3143 - protein, 37 aa, Artificial Sequence
  Synthetic Peptide
LGDTTHTCPRCPEPKSCDTPPPCPRCPEPKSCDTPPP

SEQ ID NO: 3144 - protein, 37 aa, Artificial Sequence
  Synthetic Peptide
GDTTHTCPRCPEPKSCDTPPPCPRCPEPKSCDTPPPC

SEQ ID NO: 3145 - protein, 37 aa, Artificial Sequence
  Synthetic Peptide
DTTHTCPRCPEPKSCDTPPPCPRCPEPKSCDTPPPCP

SEQ ID NO: 3146 - protein, 37 aa, Artificial Sequence
  Synthetic Peptide
TTHTCPRCPEPKSCDTPPPCPRCPEPKSCDTPPPCPR

SEQ ID NO: 3147 - protein, 37 aa, Artificial Sequence
  Synthetic Peptide
THTCPRCPEPKSCDTPPPCPRCPEPKSCDTPPPCPRC

SEQ ID NO: 3148 - protein, 37 aa, Artificial Sequence
  Synthetic Peptide
HTCPRCPEPKSCDTPPPCPRCPEPKSCDTPPPCPRCP

SEQ ID NO: 3149 - protein, 37 aa, Artificial Sequence
  Synthetic Peptide
TCPRCPEPKSCDTPPPCPRCPEPKSCDTPPPCPRCPE

SEQ ID NO: 3150 - protein, 37 aa, Artificial Sequence
  Synthetic Peptide
CPRCPEPKSCDTPPPCPRCPEPKSCDTPPPCPRCPEP

SEQ ID NO: 3151 - protein, 37 aa, Artificial Sequence
  Synthetic Peptide
PRCPEPKSCDTPPPCPRCPEPKSCDTPPPCPRCPEPK

SEQ ID NO: 3152 - protein, 37 aa, Artificial Sequence
  Synthetic Peptide
RCPEPKSCDTPPPCPRCPEPKSCDTPPPCPRCPEPKS

SEQ ID NO: 3153 - protein, 37 aa, Artificial Sequence
  Synthetic Peptide
CPEPKSCDTPPPCPRCPEPKSCDTPPPCPRCPEPKSC

SEQ ID NO: 3154 - protein, 37 aa, Artificial Sequence
  Synthetic Peptide
PEPKSCDTPPPCPRCPEPKSCDTPPPCPRCPEPKSCD

SEQ ID NO: 3155 - protein, 37 aa, Artificial Sequence
  Synthetic Peptide
EPKSCDTPPPCPRCPEPKSCDTPPPCPRCPEPKSCDT

SEQ ID NO: 3156 - protein, 37 aa, Artificial Sequence
  Synthetic Peptide
PKSCDTPPPCPRCPEPKSCDTPPPCPRCPEPKSCDTP

SEQ ID NO: 3157 - protein, 37 aa, Artificial Sequence
  Synthetic Peptide
KSCDTPPPCPRCPEPKSCDTPPPCPRCPEPKSCDTPP

SEQ ID NO: 3158 - protein, 37 aa, Artificial Sequence
  Synthetic Peptide
SCDTPPPCPRCPEPKSCDTPPPCPRCPEPKSCDTPPP

SEQ ID NO: 3159 - protein, 37 aa, Artificial Sequence
  Synthetic Peptide
CDTPPPCPRCPEPKSCDTPPPCPRCPEPKSCDTPPPC

SEQ ID NO: 3160 - protein, 37 aa, Artificial Sequence
  Synthetic Peptide
DTPPPCPRCPEPKSCDTPPPCPRCPEPKSCDTPPPCP

SEQ ID NO: 3161 - protein, 37 aa, Artificial Sequence
  Synthetic Peptide
TPPPCPRCPEPKSCDTPPPCPRCPEPKSCDTPPPCPR

SEQ ID NO: 3162 - protein, 37 aa, Artificial Sequence
  Synthetic Peptide
PPPCPRCPEPKSCDTPPPCPRCPEPKSCDTPPPCPRC

SEQ ID NO: 3163 - protein, 37 aa, Artificial Sequence
  Synthetic Peptide
PPCPRCPEPKSCDTPPPCPRCPEPKSCDTPPPCPRCP

SEQ ID NO: 3164 - protein, 36 aa, Artificial Sequence
  Synthetic Peptide
ELKTPLGDTTHTCPRCPEPKSCDTPPPCPRCPEPKS

SEQ ID NO: 3165 - protein, 36 aa, Artificial Sequence
  Synthetic Peptide
LKTPLGDTTHTCPRCPEPKSCDTPPPCPRCPEPKSC

SEQ ID NO: 3166 - protein, 36 aa, Artificial Sequence
  Synthetic Peptide
KTPLGDTTHTCPRCPEPKSCDTPPPCPRCPEPKSCD

SEQ ID NO: 3167 - protein, 36 aa, Artificial Sequence
  Synthetic Peptide
TPLGDTTHTCPRCPEPKSCDTPPPCPRCPEPKSCDT

SEQ ID NO: 3168 - protein, 36 aa, Artificial Sequence
  Synthetic Peptide
PLGDTTHTCPRCPEPKSCDTPPPCPRCPEPKSCDTP

SEQ ID NO: 3169 - protein, 36 aa, Artificial Sequence
  Synthetic Peptide
LGDTTHTCPRCPEPKSCDTPPPCPRCPEPKSCDTPP

SEQ ID NO: 3170 - protein, 36 aa, Artificial Sequence
  Synthetic Peptide
GDTTHTCPRCPEPKSCDTPPPCPRCPEPKSCDTPPP

SEQ ID NO: 3171 - protein, 36 aa, Artificial Sequence
  Synthetic Peptide
DTTHTCPRCPEPKSCDTPPPCPRCPEPKSCDTPPPC

SEQ ID NO: 3172 - protein, 36 aa, Artificial Sequence
  Synthetic Peptide
TTHTCPRCPEPKSCDTPPPCPRCPEPKSCDTPPPCP

SEQ ID NO: 3173 - protein, 36 aa, Artificial Sequence
  Synthetic Peptide
THTCPRCPEPKSCDTPPPCPRCPEPKSCDTPPPCPR

SEQ ID NO: 3174 - protein, 36 aa, Artificial Sequence
  Synthetic Peptide
HTCPRCPEPKSCDTPPPCPRCPEPKSCDTPPPCPRC

SEQ ID NO: 3175 - protein, 36 aa, Artificial Sequence
  Synthetic Peptide
TCPRCPEPKSCDTPPPCPRCPEPKSCDTPPPCPRCP

SEQ ID NO: 3176 - protein, 36 aa, Artificial Sequence
  Synthetic Peptide
CPRCPEPKSCDTPPPCPRCPEPKSCDTPPPCPRCPE

SEQ ID NO: 3177 - protein, 36 aa, Artificial Sequence
  Synthetic Peptide
PRCPEPKSCDTPPPCPRCPEPKSCDTPPPCPRCPEP

SEQ ID NO: 3178 - protein, 36 aa, Artificial Sequence
  Synthetic Peptide
RCPEPKSCDTPPPCPRCPEPKSCDTPPPCPRCPEPK

SEQ ID NO: 3179 - protein, 36 aa, Artificial Sequence
  Synthetic Peptide
CPEPKSCDTPPPCPRCPEPKSCDTPPPCPRCPEPKS

SEQ ID NO: 3180 - protein, 36 aa, Artificial Sequence
  Synthetic Peptide
PEPKSCDTPPPCPRCPEPKSCDTPPPCPRCPEPKSC

SEQ ID NO: 3181 - protein, 36 aa, Artificial Sequence
  Synthetic Peptide
EPKSCDTPPPCPRCPEPKSCDTPPPCPRCPEPKSCD

SEQ ID NO: 3182 - protein, 36 aa, Artificial Sequence
  Synthetic Peptide
PKSCDTPPPCPRCPEPKSCDTPPPCPRCPEPKSCDT

SEQ ID NO: 3183 - protein, 36 aa, Artificial Sequence
  Synthetic Peptide
KSCDTPPPCPRCPEPKSCDTPPPCPRCPEPKSCDTP

SEQ ID NO: 3184 - protein, 36 aa, Artificial Sequence
  Synthetic Peptide
SCDTPPPCPRCPEPKSCDTPPPCPRCPEPKSCDTPP

SEQ ID NO: 3185 - protein, 36 aa, Artificial Sequence
  Synthetic Peptide
CDTPPPCPRCPEPKSCDTPPPCPRCPEPKSCDTPPP

SEQ ID NO: 3186 - protein, 36 aa, Artificial Sequence
  Synthetic Peptide
DTPPPCPRCPEPKSCDTPPPCPRCPEPKSCDTPPPC

SEQ ID NO: 3187 - protein, 36 aa, Artificial Sequence
  Synthetic Peptide
TPPPCPRCPEPKSCDTPPPCPRCPEPKSCDTPPPCP

SEQ ID NO: 3188 - protein, 36 aa, Artificial Sequence
  Synthetic Peptide
PPPCPRCPEPKSCDTPPPCPRCPEPKSCDTPPPCPR

SEQ ID NO: 3189 - protein, 36 aa, Artificial Sequence
  Synthetic Peptide
PPCPRCPEPKSCDTPPPCPRCPEPKSCDTPPPCPRC

SEQ ID NO: 3190 - protein, 36 aa, Artificial Sequence
  Synthetic Peptide
PCPRCPEPKSCDTPPPCPRCPEPKSCDTPPPCPRCP

SEQ ID NO: 3191 - protein, 35 aa, Artificial Sequence
  Synthetic Peptide
ELKTPLGDTTHTCPRCPEPKSCDTPPPCPRCPEPK

SEQ ID NO: 3192 - protein, 35 aa, Artificial Sequence
  Synthetic Peptide
LKTPLGDTTHTCPRCPEPKSCDTPPPCPRCPEPKS

SEQ ID NO: 3193 - protein, 35 aa, Artificial Sequence
  Synthetic Peptide
KTPLGDTTHTCPRCPEPKSCDTPPPCPRCPEPKSC

SEQ ID NO: 3194 - protein, 35 aa, Artificial Sequence
  Synthetic Peptide
TPLGDTTHTCPRCPEPKSCDTPPPCPRCPEPKSCD

SEQ ID NO: 3195 - protein, 35 aa, Artificial Sequence
  Synthetic Peptide
PLGDTTHTCPRCPEPKSCDTPPPCPRCPEPKSCDT

SEQ ID NO: 3196 - protein, 35 aa, Artificial Sequence
  Synthetic Peptide
LGDTTHTCPRCPEPKSCDTPPPCPRCPEPKSCDTP

SEQ ID NO: 3197 - protein, 35 aa, Artificial Sequence
  Synthetic Peptide
GDTTHTCPRCPEPKSCDTPPPCPRCPEPKSCDTPP

SEQ ID NO: 3198 - protein, 35 aa, Artificial Sequence
  Synthetic Peptide
DTTHTCPRCPEPKSCDTPPPCPRCPEPKSCDTPPP

SEQ ID NO: 3199 - protein, 35 aa, Artificial Sequence
  Synthetic Peptide
TTHTCPRCPEPKSCDTPPPCPRCPEPKSCDTPPPC

SEQ ID NO: 3200 - protein, 35 aa, Artificial Sequence
  Synthetic Peptide
THTCPRCPEPKSCDTPPPCPRCPEPKSCDTPPPCP

SEQ ID NO: 3201 - protein, 35 aa, Artificial Sequence
  Synthetic Peptide
HTCPRCPEPKSCDTPPPCPRCPEPKSCDTPPPCPR

SEQ ID NO: 3202 - protein, 35 aa, Artificial Sequence
  Synthetic Peptide
TCPRCPEPKSCDTPPPCPRCPEPKSCDTPPPCPRC

SEQ ID NO: 3203 - protein, 35 aa, Artificial Sequence
  Synthetic Peptide
CPRCPEPKSCDTPPPCPRCPEPKSCDTPPPCPRCP

SEQ ID NO: 3204 - protein, 35 aa, Artificial Sequence
  Synthetic Peptide
PRCPEPKSCDTPPPCPRCPEPKSCDTPPPCPRCPE

SEQ ID NO: 3205 - protein, 35 aa, Artificial Sequence
  Synthetic Peptide
RCPEPKSCDTPPPCPRCPEPKSCDTPPPCPRCPEP

SEQ ID NO: 3206 - protein, 35 aa, Artificial Sequence
  Synthetic Peptide
CPEPKSCDTPPPCPRCPEPKSCDTPPPCPRCPEPK

SEQ ID NO: 3207 - protein, 35 aa, Artificial Sequence
  Synthetic Peptide
PEPKSCDTPPPCPRCPEPKSCDTPPPCPRCPEPKS

SEQ ID NO: 3208 - protein, 35 aa, Artificial Sequence
  Synthetic Peptide
EPKSCDTPPPCPRCPEPKSCDTPPPCPRCPEPKSC

SEQ ID NO: 3209 - protein, 35 aa, Artificial Sequence
  Synthetic Peptide
PKSCDTPPPCPRCPEPKSCDTPPPCPRCPEPKSCD

SEQ ID NO: 3210 - protein, 35 aa, Artificial Sequence
  Synthetic Peptide
KSCDTPPPCPRCPEPKSCDTPPPCPRCPEPKSCDT

SEQ ID NO: 3211 - protein, 35 aa, Artificial Sequence
  Synthetic Peptide
SCDTPPPCPRCPEPKSCDTPPPCPRCPEPKSCDTP

SEQ ID NO: 3212 - protein, 35 aa, Artificial Sequence
  Synthetic Peptide
CDTPPPCPRCPEPKSCDTPPPCPRCPEPKSCDTPP

SEQ ID NO: 3213 - protein, 35 aa, Artificial Sequence
  Synthetic Peptide
DTPPPCPRCPEPKSCDTPPPCPRCPEPKSCDTPPP

SEQ ID NO: 3214 - protein, 35 aa, Artificial Sequence
  Synthetic Peptide
TPPPCPRCPEPKSCDTPPPCPRCPEPKSCDTPPPC

SEQ ID NO: 3215 - protein, 35 aa, Artificial Sequence
  Synthetic Peptide
PPPCPRCPEPKSCDTPPPCPRCPEPKSCDTPPPCP

SEQ ID NO: 3216 - protein, 35 aa, Artificial Sequence
  Synthetic Peptide
PPCPRCPEPKSCDTPPPCPRCPEPKSCDTPPPCPR

SEQ ID NO: 3217 - protein, 35 aa, Artificial Sequence
  Synthetic Peptide
PCPRCPEPKSCDTPPPCPRCPEPKSCDTPPPCPRC

SEQ ID NO: 3218 - protein, 35 aa, Artificial Sequence; identical to SEQ ID NO: 3203
  Synthetic Peptide

SEQ ID NO: 3219 - protein, 34 aa, Artificial Sequence
  Synthetic Peptide
ELKTPLGDTTHTCPRCPEPKSCDTPPPCPRCPEP

SEQ ID NO: 3220 - protein, 34 aa, Artificial Sequence
  Synthetic Peptide
LKTPLGDTTHTCPRCPEPKSCDTPPPCPRCPEPK

SEQ ID NO: 3221 - protein, 34 aa, Artificial Sequence
  Synthetic Peptide
KTPLGDTTHTCPRCPEPKSCDTPPPCPRCPEPKS

SEQ ID NO: 3222 - protein, 34 aa, Artificial Sequence
  Synthetic Peptide
TPLGDTTHTCPRCPEPKSCDTPPPCPRCPEPKSC

SEQ ID NO: 3223 - protein, 34 aa, Artificial Sequence
  Synthetic Peptide
PLGDTTHTCPRCPEPKSCDTPPPCPRCPEPKSCD

SEQ ID NO: 3224 - protein, 34 aa, Artificial Sequence
  Synthetic Peptide
LGDTTHTCPRCPEPKSCDTPPPCPRCPEPKSCDT

SEQ ID NO: 3225 - protein, 34 aa, Artificial Sequence
  Synthetic Peptide
GDTTHTCPRCPEPKSCDTPPPCPRCPEPKSCDTP

SEQ ID NO: 3226 - protein, 34 aa, Artificial Sequence
  Synthetic Peptide
DTTHTCPRCPEPKSCDTPPPCPRCPEPKSCDTPP

SEQ ID NO: 3227 - protein, 34 aa, Artificial Sequence
  Synthetic Peptide
TTHTCPRCPEPKSCDTPPPCPRCPEPKSCDTPPP

SEQ ID NO: 3228 - protein, 34 aa, Artificial Sequence
  Synthetic Peptide
THTCPRCPEPKSCDTPPPCPRCPEPKSCDTPPPC

SEQ ID NO: 3229 - protein, 34 aa, Artificial Sequence
  Synthetic Peptide
HTCPRCPEPKSCDTPPPCPRCPEPKSCDTPPPCP

SEQ ID NO: 3230 - protein, 34 aa, Artificial Sequence
  Synthetic Peptide
TCPRCPEPKSCDTPPPCPRCPEPKSCDTPPPCPR

SEQ ID NO: 3231 - protein, 34 aa, Artificial Sequence
  Synthetic Peptide
CPRCPEPKSCDTPPPCPRCPEPKSCDTPPPCPRC

SEQ ID NO: 3232 - protein, 34 aa, Artificial Sequence
  Synthetic Peptide
PRCPEPKSCDTPPPCPRCPEPKSCDTPPPCPRCP

SEQ ID NO: 3233 - protein, 34 aa, Artificial Sequence
  Synthetic Peptide
RCPEPKSCDTPPPCPRCPEPKSCDTPPPCPRCPE

SEQ ID NO: 3234 - protein, 34 aa, Artificial Sequence
  Synthetic Peptide
CPEPKSCDTPPPCPRCPEPKSCDTPPPCPRCPEP

SEQ ID NO: 3235 - protein, 34 aa, Artificial Sequence
  Synthetic Peptide
PEPKSCDTPPPCPRCPEPKSCDTPPPCPRCPEPK

SEQ ID NO: 3236 - protein, 34 aa, Artificial Sequence
  Synthetic Peptide
EPKSCDTPPPCPRCPEPKSCDTPPPCPRCPEPKS

SEQ ID NO: 3237 - protein, 34 aa, Artificial Sequence
  Synthetic Peptide
PKSCDTPPPCPRCPEPKSCDTPPPCPRCPEPKSC

SEQ ID NO: 3238 - protein, 34 aa, Artificial Sequence
  Synthetic Peptide
KSCDTPPPCPRCPEPKSCDTPPPCPRCPEPKSCD

SEQ ID NO: 3239 - protein, 34 aa, Artificial Sequence
  Synthetic Peptide
SCDTPPPCPRCPEPKSCDTPPPCPRCPEPKSCDT

SEQ ID NO: 3240 - protein, 34 aa, Artificial Sequence
  Synthetic Peptide
CDTPPPCPRCPEPKSCDTPPPCPRCPEPKSCDTP

SEQ ID NO: 3241 - protein, 34 aa, Artificial Sequence
  Synthetic Peptide
DTPPPCPRCPEPKSCDTPPPCPRCPEPKSCDTPP

SEQ ID NO: 3242 - protein, 34 aa, Artificial Sequence
  Synthetic Peptide
TPPPCPRCPEPKSCDTPPPCPRCPEPKSCDTPPP

SEQ ID NO: 3243 - protein, 34 aa, Artificial Sequence
  Synthetic Peptide
PPPCPRCPEPKSCDTPPPCPRCPEPKSCDTPPPC

SEQ ID NO: 3244 - protein, 34 aa, Artificial Sequence
  Synthetic Peptide
PPCPRCPEPKSCDTPPPCPRCPEPKSCDTPPPCP

SEQ ID NO: 3245 - protein, 34 aa, Artificial Sequence
  Synthetic Peptide
PCPRCPEPKSCDTPPPCPRCPEPKSCDTPPPCPR

SEQ ID NO: 3246 - protein, 34 aa, Artificial Sequence; identical to SEQ ID NO: 3231
  Synthetic Peptide

SEQ ID NO: 3247 - protein, 34 aa, Artificial Sequence; identical to SEQ ID NO: 3232
  Synthetic Peptide

SEQ ID NO: 3248 - protein, 33 aa, Artificial Sequence
  Synthetic Peptide
ELKTPLGDTTHTCPRCPEPKSCDTPPPCPRCPE

SEQ ID NO: 3249 - protein, 33 aa, Artificial Sequence
  Synthetic Peptide
LKTPLGDTTHTCPRCPEPKSCDTPPPCPRCPEP

SEQ ID NO: 3250 - protein, 33 aa, Artificial Sequence
  Synthetic Peptide
KTPLGDTTHTCPRCPEPKSCDTPPPCPRCPEPK

SEQ ID NO: 3251 - protein, 33 aa, Artificial Sequence
  Synthetic Peptide
TPLGDTTHTCPRCPEPKSCDTPPPCPRCPEPKS

SEQ ID NO: 3252 - protein, 33 aa, Artificial Sequence
  Synthetic Peptide
PLGDTTHTCPRCPEPKSCDTPPPCPRCPEPKSC

SEQ ID NO: 3253 - protein, 33 aa, Artificial Sequence
  Synthetic Peptide
LGDTTHTCPRCPEPKSCDTPPPCPRCPEPKSCD

SEQ ID NO: 3254 - protein, 33 aa, Artificial Sequence
  Synthetic Peptide
GDTTHTCPRCPEPKSCDTPPPCPRCPEPKSCDT

SEQ ID NO: 3255 - protein, 33 aa, Artificial Sequence
  Synthetic Peptide
DTTHTCPRCPEPKSCDTPPPCPRCPEPKSCDTP

SEQ ID NO: 3256 - protein, 33 aa, Artificial Sequence
  Synthetic Peptide
TTHTCPRCPEPKSCDTPPPCPRCPEPKSCDTPP

SEQ ID NO: 3257 - protein, 33 aa, Artificial Sequence
  Synthetic Peptide
THTCPRCPEPKSCDTPPPCPRCPEPKSCDTPPP

SEQ ID NO: 3258 - protein, 33 aa, Artificial Sequence
  Synthetic Peptide
HTCPRCPEPKSCDTPPPCPRCPEPKSCDTPPPC

SEQ ID NO: 3259 - protein, 33 aa, Artificial Sequence
  Synthetic Peptide
TCPRCPEPKSCDTPPPCPRCPEPKSCDTPPPCP

SEQ ID NO: 3260 - protein, 33 aa, Artificial Sequence
  Synthetic Peptide
CPRCPEPKSCDTPPPCPRCPEPKSCDTPPPCPR

SEQ ID NO: 3261 - protein, 33 aa, Artificial Sequence
  Synthetic Peptide
PRCPEPKSCDTPPPCPRCPEPKSCDTPPPCPRC

SEQ ID NO: 3262 - protein, 33 aa, Artificial Sequence
  Synthetic Peptide
RCPEPKSCDTPPPCPRCPEPKSCDTPPPCPRCP

SEQ ID NO: 3263 - protein, 33 aa, Artificial Sequence
  Synthetic Peptide
CPEPKSCDTPPPCPRCPEPKSCDTPPPCPRCPE

SEQ ID NO: 3264 - protein, 33 aa, Artificial Sequence
  Synthetic Peptide
PEPKSCDTPPPCPRCPEPKSCDTPPPCPRCPEP

SEQ ID NO: 3265 - protein, 33 aa, Artificial Sequence
  Synthetic Peptide
EPKSCDTPPPCPRCPEPKSCDTPPPCPRCPEPK

SEQ ID NO: 3266 - protein, 33 aa, Artificial Sequence
  Synthetic Peptide
PKSCDTPPPCPRCPEPKSCDTPPPCPRCPEPKS

SEQ ID NO: 3267 - protein, 33 aa, Artificial Sequence
  Synthetic Peptide
KSCDTPPPCPRCPEPKSCDTPPPCPRCPEPKSC

SEQ ID NO: 3268 - protein, 33 aa, Artificial Sequence
  Synthetic Peptide
SCDTPPPCPRCPEPKSCDTPPPCPRCPEPKSCD

SEQ ID NO: 3269 - protein, 33 aa, Artificial Sequence
  Synthetic Peptide
CDTPPPCPRCPEPKSCDTPPPCPRCPEPKSCDT

SEQ ID NO: 3270 - protein, 33 aa, Artificial Sequence
  Synthetic Peptide
DTPPPCPRCPEPKSCDTPPPCPRCPEPKSCDTP

SEQ ID NO: 3271 - protein, 33 aa, Artificial Sequence
  Synthetic Peptide
TPPPCPRCPEPKSCDTPPPCPRCPEPKSCDTPP

SEQ ID NO: 3272 - protein, 33 aa, Artificial Sequence
  Synthetic Peptide
PPPCPRCPEPKSCDTPPPCPRCPEPKSCDTPPP

SEQ ID NO: 3273 - protein, 33 aa, Artificial Sequence
  Synthetic Peptide
PPCPRCPEPKSCDTPPPCPRCPEPKSCDTPPPC

SEQ ID NO: 3274 - protein, 33 aa, Artificial Sequence
  Synthetic Peptide
PCPRCPEPKSCDTPPPCPRCPEPKSCDTPPPCP

SEQ ID NO: 3275 - protein, 33 aa, Artificial Sequence; identical to SEQ ID NO: 3260
  Synthetic Peptide

SEQ ID NO: 3276 - protein, 33 aa, Artificial Sequence; identical to SEQ ID NO: 3261
  Synthetic Peptide

SEQ ID NO: 3277 - protein, 33 aa, Artificial Sequence; identical to SEQ ID NO: 3262
  Synthetic Peptide

SEQ ID NO: 3278 - protein, 32 aa, Artificial Sequence
  Synthetic Peptide
ELKTPLGDTTHTCPRCPEPKSCDTPPPCPRCP

SEQ ID NO: 3279 - protein, 32 aa, Artificial Sequence
  Synthetic Peptide
LKTPLGDTTHTCPRCPEPKSCDTPPPCPRCPE

SEQ ID NO: 3280 - protein, 32 aa, Artificial Sequence
  Synthetic Peptide
KTPLGDTTHTCPRCPEPKSCDTPPPCPRCPEP

SEQ ID NO: 3281 - protein, 32 aa, Artificial Sequence
  Synthetic Peptide
TPLGDTTHTCPRCPEPKSCDTPPPCPRCPEPK

SEQ ID NO: 3282 - protein, 32 aa, Artificial Sequence
  Synthetic Peptide
PLGDTTHTCPRCPEPKSCDTPPPCPRCPEPKS

SEQ ID NO: 3283 - protein, 32 aa, Artificial Sequence
  Synthetic Peptide
LGDTTHTCPRCPEPKSCDTPPPCPRCPEPKSC

SEQ ID NO: 3284 - protein, 32 aa, Artificial Sequence
  Synthetic Peptide
GDTTHTCPRCPEPKSCDTPPPCPRCPEPKSCD

SEQ ID NO: 3285 - protein, 32 aa, Artificial Sequence
  Synthetic Peptide
DTTHTCPRCPEPKSCDTPPPCPRCPEPKSCDT

SEQ ID NO: 3286 - protein, 32 aa, Artificial Sequence
  Synthetic Peptide
TTHTCPRCPEPKSCDTPPPCPRCPEPKSCDTP

SEQ ID NO: 3287 - protein, 32 aa, Artificial Sequence
  Synthetic Peptide
THTCPRCPEPKSCDTPPPCPRCPEPKSCDTPP

SEQ ID NO: 3288 - protein, 32 aa, Artificial Sequence
  Synthetic Peptide
HTCPRCPEPKSCDTPPPCPRCPEPKSCDTPPP

SEQ ID NO: 3289 - protein, 32 aa, Artificial Sequence
  Synthetic Peptide
TCPRCPEPKSCDTPPPCPRCPEPKSCDTPPPC

SEQ ID NO: 3290 - protein, 32 aa, Artificial Sequence
  Synthetic Peptide
CPRCPEPKSCDTPPPCPRCPEPKSCDTPPPCP

SEQ ID NO: 3291 - protein, 32 aa, Artificial Sequence
  Synthetic Peptide
PRCPEPKSCDTPPPCPRCPEPKSCDTPPPCPR

SEQ ID NO: 3292 - protein, 32 aa, Artificial Sequence
  Synthetic Peptide
RCPEPKSCDTPPPCPRCPEPKSCDTPPPCPRC

SEQ ID NO: 3293 - protein, 32 aa, Artificial Sequence
  Synthetic Peptide
CPEPKSCDTPPPCPRCPEPKSCDTPPPCPRCP

SEQ ID NO: 3294 - protein, 32 aa, Artificial Sequence
  Synthetic Peptide
PEPKSCDTPPPCPRCPEPKSCDTPPPCPRCPE

SEQ ID NO: 3295 - protein, 32 aa, Artificial Sequence
  Synthetic Peptide
EPKSCDTPPPCPRCPEPKSCDTPPPCPRCPEP

SEQ ID NO: 3296 - protein, 32 aa, Artificial Sequence
  Synthetic Peptide
PKSCDTPPPCPRCPEPKSCDTPPPCPRCPEPK

SEQ ID NO: 3297 - protein, 32 aa, Artificial Sequence
  Synthetic Peptide
KSCDTPPPCPRCPEPKSCDTPPPCPRCPEPKS

SEQ ID NO: 3298 - protein, 32 aa, Artificial Sequence
  Synthetic Peptide
SCDTPPPCPRCPEPKSCDTPPPCPRCPEPKSC

SEQ ID NO: 3299 - protein, 32 aa, Artificial Sequence
  Synthetic Peptide
CDTPPPCPRCPEPKSCDTPPPCPRCPEPKSCD

SEQ ID NO: 3300 - protein, 32 aa, Artificial Sequence
  Synthetic Peptide
DTPPPCPRCPEPKSCDTPPPCPRCPEPKSCDT

SEQ ID NO: 3301 - protein, 32 aa, Artificial Sequence
  Synthetic Peptide
TPPPCPRCPEPKSCDTPPPCPRCPEPKSCDTP

SEQ ID NO: 3302 - protein, 32 aa, Artificial Sequence
  Synthetic Peptide
PPPCPRCPEPKSCDTPPPCPRCPEPKSCDTPP

SEQ ID NO: 3303 - protein, 32 aa, Artificial Sequence
  Synthetic Peptide
PPCPRCPEPKSCDTPPPCPRCPEPKSCDTPPP

SEQ ID NO: 3304 - protein, 32 aa, Artificial Sequence
  Synthetic Peptide
PCPRCPEPKSCDTPPPCPRCPEPKSCDTPPPC

SEQ ID NO: 3305 - protein, 32 aa, Artificial Sequence; identical to SEQ ID NO: 3290
  Synthetic Peptide

SEQ ID NO: 3306 - protein, 32 aa, Artificial Sequence; identical to SEQ ID NO: 3291
  Synthetic Peptide

SEQ ID NO: 3307 - protein, 32 aa, Artificial Sequence; identical to SEQ ID NO: 3292
  Synthetic Peptide

SEQ ID NO: 3308 - protein, 32 aa, Artificial Sequence; identical to SEQ ID NO: 3293
  Synthetic Peptide

SEQ ID NO: 3309 - protein, 31 aa, Artificial Sequence
  Synthetic Peptide
ELKTPLGDTTHTCPRCPEPKSCDTPPPCPRC

SEQ ID NO: 3310 - protein, 31 aa, Artificial Sequence
  Synthetic Peptide
LKTPLGDTTHTCPRCPEPKSCDTPPPCPRCP

SEQ ID NO: 3311 - protein, 31 aa, Artificial Sequence
  Synthetic Peptide
KTPLGDTTHTCPRCPEPKSCDTPPPCPRCPE

SEQ ID NO: 3312 - protein, 31 aa, Artificial Sequence
  Synthetic Peptide
TPLGDTTHTCPRCPEPKSCDTPPPCPRCPEP

SEQ ID NO: 3313 - protein, 31 aa, Artificial Sequence
  Synthetic Peptide
PLGDTTHTCPRCPEPKSCDTPPPCPRCPEPK

SEQ ID NO: 3314 - protein, 31 aa, Artificial Sequence
  Synthetic Peptide
LGDTTHTCPRCPEPKSCDTPPPCPRCPEPKS

SEQ ID NO: 3315 - protein, 31 aa, Artificial Sequence
  Synthetic Peptide
GDTTHTCPRCPEPKSCDTPPPCPRCPEPKSC

SEQ ID NO: 3316 - protein, 31 aa, Artificial Sequence
  Synthetic Peptide
DTTHTCPRCPEPKSCDTPPPCPRCPEPKSCD

SEQ ID NO: 3317 - protein, 31 aa, Artificial Sequence
  Synthetic Peptide
TTHTCPRCPEPKSCDTPPPCPRCPEPKSCDT

SEQ ID NO: 3318 - protein, 31 aa, Artificial Sequence
  Synthetic Peptide
THTCPRCPEPKSCDTPPPCPRCPEPKSCDTP

SEQ ID NO: 3319 - protein, 31 aa, Artificial Sequence
  Synthetic Peptide
HTCPRCPEPKSCDTPPPCPRCPEPKSCDTPP

SEQ ID NO: 3320 - protein, 31 aa, Artificial Sequence
  Synthetic Peptide
TCPRCPEPKSCDTPPPCPRCPEPKSCDTPPP

SEQ ID NO: 3321 - protein, 31 aa, Artificial Sequence
  Synthetic Peptide
CPRCPEPKSCDTPPPCPRCPEPKSCDTPPPC

SEQ ID NO: 3322 - protein, 31 aa, Artificial Sequence
  Synthetic Peptide
PRCPEPKSCDTPPPCPRCPEPKSCDTPPPCP

SEQ ID NO: 3323 - protein, 31 aa, Artificial Sequence
  Synthetic Peptide
RCPEPKSCDTPPPCPRCPEPKSCDTPPPCPR

SEQ ID NO: 3324 - protein, 31 aa, Artificial Sequence
  Synthetic Peptide
CPEPKSCDTPPPCPRCPEPKSCDTPPPCPRC

SEQ ID NO: 3325 - protein, 31 aa, Artificial Sequence
  Synthetic Peptide
PEPKSCDTPPPCPRCPEPKSCDTPPPCPRCP

SEQ ID NO: 3326 - protein, 31 aa, Artificial Sequence
  Synthetic Peptide
EPKSCDTPPPCPRCPEPKSCDTPPPCPRCPE

SEQ ID NO: 3327 - protein, 31 aa, Artificial Sequence
  Synthetic Peptide
PKSCDTPPPCPRCPEPKSCDTPPPCPRCPEP

SEQ ID NO: 3328 - protein, 31 aa, Artificial Sequence
  Synthetic Peptide
KSCDTPPPCPRCPEPKSCDTPPPCPRCPEPK

SEQ ID NO: 3329 - protein, 31 aa, Artificial Sequence
  Synthetic Peptide
SCDTPPPCPRCPEPKSCDTPPPCPRCPEPKS

SEQ ID NO: 3330 - protein, 31 aa, Artificial Sequence
  Synthetic Peptide
CDTPPPCPRCPEPKSCDTPPPCPRCPEPKSC

SEQ ID NO: 3331 - protein, 31 aa, Artificial Sequence
  Synthetic Peptide
DTPPPCPRCPEPKSCDTPPPCPRCPEPKSCD

SEQ ID NO: 3332 - protein, 31 aa, Artificial Sequence
  Synthetic Peptide
TPPPCPRCPEPKSCDTPPPCPRCPEPKSCDT

SEQ ID NO: 3333 - protein, 31 aa, Artificial Sequence
  Synthetic Peptide
PPPCPRCPEPKSCDTPPPCPRCPEPKSCDTP

SEQ ID NO: 3334 - protein, 31 aa, Artificial Sequence
  Synthetic Peptide
PPCPRCPEPKSCDTPPPCPRCPEPKSCDTPP

SEQ ID NO: 3335 - protein, 31 aa, Artificial Sequence
  Synthetic Peptide
PCPRCPEPKSCDTPPPCPRCPEPKSCDTPPP

SEQ ID NO: 3336 - protein, 31 aa, Artificial Sequence; identical to SEQ ID NO: 3321
  Synthetic Peptide

SEQ ID NO: 3337 - protein, 31 aa, Artificial Sequence; identical to SEQ ID NO: 3322
  Synthetic Peptide

SEQ ID NO: 3338 - protein, 31 aa, Artificial Sequence; identical to SEQ ID NO: 3323
  Synthetic Peptide

SEQ ID NO: 3339 - protein, 31 aa, Artificial Sequence; identical to SEQ ID NO: 3324
  Synthetic Peptide

SEQ ID NO: 3340 - protein, 31 aa, Artificial Sequence; identical to SEQ ID NO: 3325
  Synthetic Peptide

SEQ ID NO: 3341 - protein, 30 aa, Artificial Sequence
  Synthetic Peptide
ELKTPLGDTTHTCPRCPEPKSCDTPPPCPR

SEQ ID NO: 3342 - protein, 30 aa, Artificial Sequence
  Synthetic Peptide
LKTPLGDTTHTCPRCPEPKSCDTPPPCPRC

SEQ ID NO: 3343 - protein, 30 aa, Artificial Sequence
  Synthetic Peptide
KTPLGDTTHTCPRCPEPKSCDTPPPCPRCP

SEQ ID NO: 3344 - protein, 30 aa, Artificial Sequence
  Synthetic Peptide
TPLGDTTHTCPRCPEPKSCDTPPPCPRCPE

SEQ ID NO: 3345 - protein, 30 aa, Artificial Sequence
  Synthetic Peptide
PLGDTTHTCPRCPEPKSCDTPPPCPRCPEP

SEQ ID NO: 3346 - protein, 30 aa, Artificial Sequence
  Synthetic Peptide
LGDTTHTCPRCPEPKSCDTPPPCPRCPEPK

SEQ ID NO: 3347 - protein, 30 aa, Artificial Sequence
  Synthetic Peptide
GDTTHTCPRCPEPKSCDTPPPCPRCPEPKS

SEQ ID NO: 3348 - protein, 30 aa, Artificial Sequence
  Synthetic Peptide
DTTHTCPRCPEPKSCDTPPPCPRCPEPKSC

SEQ ID NO: 3349 - protein, 30 aa, Artificial Sequence
  Synthetic Peptide
TTHTCPRCPEPKSCDTPPPCPRCPEPKSCD

SEQ ID NO: 3350 - protein, 30 aa, Artificial Sequence
  Synthetic Peptide
THTCPRCPEPKSCDTPPPCPRCPEPKSCDT

SEQ ID NO: 3351 - protein, 30 aa, Artificial Sequence
  Synthetic Peptide
HTCPRCPEPKSCDTPPPCPRCPEPKSCDTP

SEQ ID NO: 3352 - protein, 30 aa, Artificial Sequence
  Synthetic Peptide
TCPRCPEPKSCDTPPPCPRCPEPKSCDTPP

SEQ ID NO: 3353 - protein, 30 aa, Artificial Sequence
  Synthetic Peptide
CPRCPEPKSCDTPPPCPRCPEPKSCDTPPP

SEQ ID NO: 3354 - protein, 30 aa, Artificial Sequence
  Synthetic Peptide
PRCPEPKSCDTPPPCPRCPEPKSCDTPPPC

SEQ ID NO: 3355 - protein, 30 aa, Artificial Sequence
  Synthetic Peptide
RCPEPKSCDTPPPCPRCPEPKSCDTPPPCP

SEQ ID NO: 3356 - protein, 30 aa, Artificial Sequence
  Synthetic Peptide
CPEPKSCDTPPPCPRCPEPKSCDTPPPCPR

SEQ ID NO: 3357 - protein, 30 aa, Artificial Sequence
  Synthetic Peptide
PEPKSCDTPPPCPRCPEPKSCDTPPPCPRC

SEQ ID NO: 3358 - protein, 30 aa, Artificial Sequence
  Synthetic Peptide
EPKSCDTPPPCPRCPEPKSCDTPPPCPRCP

SEQ ID NO: 3359 - protein, 30 aa, Artificial Sequence
  Synthetic Peptide
PKSCDTPPPCPRCPEPKSCDTPPPCPRCPE

SEQ ID NO: 3360 - protein, 30 aa, Artificial Sequence
  Synthetic Peptide
KSCDTPPPCPRCPEPKSCDTPPPCPRCPEP

SEQ ID NO: 3361 - protein, 30 aa, Artificial Sequence
  Synthetic Peptide
SCDTPPPCPRCPEPKSCDTPPPCPRCPEPK

SEQ ID NO: 3362 - protein, 30 aa, Artificial Sequence
  Synthetic Peptide
CDTPPPCPRCPEPKSCDTPPPCPRCPEPKS

SEQ ID NO: 3363 - protein, 30 aa, Artificial Sequence
  Synthetic Peptide
DTPPPCPRCPEPKSCDTPPPCPRCPEPKSC

SEQ ID NO: 3364 - protein, 30 aa, Artificial Sequence
  Synthetic Peptide
TPPPCPRCPEPKSCDTPPPCPRCPEPKSCD

SEQ ID NO: 3365 - protein, 30 aa, Artificial Sequence
  Synthetic Peptide
PPPCPRCPEPKSCDTPPPCPRCPEPKSCDT

SEQ ID NO: 3366 - protein, 30 aa, Artificial Sequence
  Synthetic Peptide
PPCPRCPEPKSCDTPPPCPRCPEPKSCDTP

SEQ ID NO: 3367 - protein, 30 aa, Artificial Sequence
  Synthetic Peptide
PCPRCPEPKSCDTPPPCPRCPEPKSCDTPP

SEQ ID NO: 3368 - protein, 30 aa, Artificial Sequence; identical to SEQ ID NO: 3353
  Synthetic Peptide

SEQ ID NO: 3369 - protein, 30 aa, Artificial Sequence; identical to SEQ ID NO: 3354
  Synthetic Peptide

SEQ ID NO: 3370 - protein, 30 aa, Artificial Sequence; identical to SEQ ID NO: 3355
  Synthetic Peptide

SEQ ID NO: 3371 - protein, 30 aa, Artificial Sequence; identical to SEQ ID NO: 3356
  Synthetic Peptide

SEQ ID NO: 3372 - protein, 30 aa, Artificial Sequence; identical to SEQ ID NO: 3357
  Synthetic Peptide

SEQ ID NO: 3373 - protein, 30 aa, Artificial Sequence; identical to SEQ ID NO: 3358
  Synthetic Peptide

SEQ ID NO: 3374 - protein, 29 aa, Artificial Sequence
  Synthetic Peptide
ELKTPLGDTTHTCPRCPEPKSCDTPPPCP

SEQ ID NO: 3375 - protein, 29 aa, Artificial Sequence
  Synthetic Peptide
LKTPLGDTTHTCPRCPEPKSCDTPPPCPR

SEQ ID NO: 3376 - protein, 29 aa, Artificial Sequence
  Synthetic Peptide
KTPLGDTTHTCPRCPEPKSCDTPPPCPRC

SEQ ID NO: 3377 - protein, 29 aa, Artificial Sequence
  Synthetic Peptide
TPLGDTTHTCPRCPEPKSCDTPPPCPRCP

SEQ ID NO: 3378 - protein, 29 aa, Artificial Sequence
  Synthetic Peptide
PLGDTTHTCPRCPEPKSCDTPPPCPRCPE

SEQ ID NO: 3379 - protein, 29 aa, Artificial Sequence
  Synthetic Peptide
LGDTTHTCPRCPEPKSCDTPPPCPRCPEP

SEQ ID NO: 3380 - protein, 29 aa, Artificial Sequence
  Synthetic Peptide
GDTTHTCPRCPEPKSCDTPPPCPRCPEPK

SEQ ID NO: 3381 - protein, 29 aa, Artificial Sequence
  Synthetic Peptide
DTTHTCPRCPEPKSCDTPPPCPRCPEPKS

SEQ ID NO: 3382 - protein, 29 aa, Artificial Sequence
  Synthetic Peptide
TTHTCPRCPEPKSCDTPPPCPRCPEPKSC

SEQ ID NO: 3383 - protein, 29 aa, Artificial Sequence
  Synthetic Peptide
THTCPRCPEPKSCDTPPPCPRCPEPKSCD

SEQ ID NO: 3384 - protein, 29 aa, Artificial Sequence
  Synthetic Peptide
HTCPRCPEPKSCDTPPPCPRCPEPKSCDT

SEQ ID NO: 3385 - protein, 29 aa, Artificial Sequence
  Synthetic Peptide
TCPRCPEPKSCDTPPPCPRCPEPKSCDTP

SEQ ID NO: 3386 - protein, 29 aa, Artificial Sequence
  Synthetic Peptide
CPRCPEPKSCDTPPPCPRCPEPKSCDTPP

SEQ ID NO: 3387 - protein, 29 aa, Artificial Sequence
  Synthetic Peptide
PRCPEPKSCDTPPPCPRCPEPKSCDTPPP

SEQ ID NO: 3388 - protein, 29 aa, Artificial Sequence
  Synthetic Peptide
RCPEPKSCDTPPPCPRCPEPKSCDTPPPC

SEQ ID NO: 3389 - protein, 29 aa, Artificial Sequence
  Synthetic Peptide
CPEPKSCDTPPPCPRCPEPKSCDTPPPCP

SEQ ID NO: 3390 - protein, 29 aa, Artificial Sequence
  Synthetic Peptide
PEPKSCDTPPPCPRCPEPKSCDTPPPCPR

SEQ ID NO: 3391 - protein, 29 aa, Artificial Sequence
  Synthetic Peptide
EPKSCDTPPPCPRCPEPKSCDTPPPCPRC

SEQ ID NO: 3392 - protein, 29 aa, Artificial Sequence
  Synthetic Peptide
PKSCDTPPPCPRCPEPKSCDTPPPCPRCP

SEQ ID NO: 3393 - protein, 29 aa, Artificial Sequence
  Synthetic Peptide
KSCDTPPPCPRCPEPKSCDTPPPCPRCPE

SEQ ID NO: 3394 - protein, 29 aa, Artificial Sequence
  Synthetic Peptide
SCDTPPPCPRCPEPKSCDTPPPCPRCPEP

SEQ ID NO: 3395 - protein, 29 aa, Artificial Sequence
  Synthetic Peptide
CDTPPPCPRCPEPKSCDTPPPCPRCPEPK

SEQ ID NO: 3396 - protein, 29 aa, Artificial Sequence
  Synthetic Peptide
DTPPPCPRCPEPKSCDTPPPCPRCPEPKS

SEQ ID NO: 3397 - protein, 29 aa, Artificial Sequence
  Synthetic Peptide
TPPPCPRCPEPKSCDTPPPCPRCPEPKSC

SEQ ID NO: 3398 - protein, 29 aa, Artificial Sequence
  Synthetic Peptide
PPPCPRCPEPKSCDTPPPCPRCPEPKSCD

SEQ ID NO: 3399 - protein, 29 aa, Artificial Sequence
  Synthetic Peptide
PPCPRCPEPKSCDTPPPCPRCPEPKSCDT

SEQ ID NO: 3400 - protein, 29 aa, Artificial Sequence
  Synthetic Peptide
PCPRCPEPKSCDTPPPCPRCPEPKSCDTP

SEQ ID NO: 3401 - protein, 29 aa, Artificial Sequence
  Synthetic Peptide
CPRCPEPKSCDTPPPCPRCPEPKSCDTPP

SEQ ID NO: 3402 - protein, 29 aa, Artificial Sequence
  Synthetic Peptide
PRCPEPKSCDTPPPCPRCPEPKSCDTPPP

SEQ ID NO: 3403 - protein, 29 aa, Artificial Sequence
  Synthetic Peptide
RCPEPKSCDTPPPCPRCPEPKSCDTPPPC

SEQ ID NO: 3404 - protein, 29 aa, Artificial Sequence
  Synthetic Peptide
CPEPKSCDTPPPCPRCPEPKSCDTPPPCP

SEQ ID NO: 3405 - protein, 29 aa, Artificial Sequence
  Synthetic Peptide
PEPKSCDTPPPCPRCPEPKSCDTPPPCPR

SEQ ID NO: 3406 - protein, 29 aa, Artificial Sequence
  Synthetic Peptide
EPKSCDTPPPCPRCPEPKSCDTPPPCPRC

SEQ ID NO: 3407 - protein, 29 aa, Artificial Sequence
  Synthetic Peptide
PKSCDTPPPCPRCPEPKSCDTPPPCPRCP

SEQ ID NO: 3408 - protein, 28 aa, Artificial Sequence
  Synthetic Peptide
ELKTPLGDTTHTCPRCPEPKSCDTPPPC

SEQ ID NO: 3409 - protein, 28 aa, Artificial Sequence
  Synthetic Peptide
LKTPLGDTTHTCPRCPEPKSCDTPPPCP

SEQ ID NO: 3410 - protein, 28 aa, Artificial Sequence
  Synthetic Peptide
KTPLGDTTHTCPRCPEPKSCDTPPPCPR

SEQ ID NO: 3411 - protein, 28 aa, Artificial Sequence
  Synthetic Peptide
TPLGDTTHTCPRCPEPKSCDTPPPCPRC

SEQ ID NO: 3412 - protein, 28 aa, Artificial Sequence
  Synthetic Peptide
PLGDTTHTCPRCPEPKSCDTPPPCPRCP

SEQ ID NO: 3413 - protein, 28 aa, Artificial Sequence
  Synthetic Peptide
LGDTTHTCPRCPEPKSCDTPPPCPRCPE

SEQ ID NO: 3414 - protein, 28 aa, Artificial Sequence
  Synthetic Peptide
GDTTHTCPRCPEPKSCDTPPPCPRCPEP

SEQ ID NO: 3415 - protein, 28 aa, Artificial Sequence
  Synthetic Peptide
DTTHTCPRCPEPKSCDTPPPCPRCPEPK

SEQ ID NO: 3416 - protein, 28 aa, Artificial Sequence
  Synthetic Peptide
TTHTCPRCPEPKSCDTPPPCPRCPEPKS

SEQ ID NO: 3417 - protein, 28 aa, Artificial Sequence
  Synthetic Peptide
THTCPRCPEPKSCDTPPPCPRCPEPKSC

SEQ ID NO: 3418 - protein, 28 aa, Artificial Sequence
  Synthetic Peptide
HTCPRCPEPKSCDTPPPCPRCPEPKSCD

SEQ ID NO: 3419 - protein, 28 aa, Artificial Sequence
  Synthetic Peptide
TCPRCPEPKSCDTPPPCPRCPEPKSCDT

SEQ ID NO: 3420 - protein, 28 aa, Artificial Sequence
  Synthetic Peptide
CPRCPEPKSCDTPPPCPRCPEPKSCDTP

SEQ ID NO: 3421 - protein, 28 aa, Artificial Sequence
  Synthetic Peptide
PRCPEPKSCDTPPPCPRCPEPKSCDTPP

SEQ ID NO: 3422 - protein, 28 aa, Artificial Sequence
  Synthetic Peptide
RCPEPKSCDTPPPCPRCPEPKSCDTPPP

SEQ ID NO: 3423 - protein, 28 aa, Artificial Sequence
  Synthetic Peptide
CPEPKSCDTPPPCPRCPEPKSCDTPPPC

SEQ ID NO: 3424 - protein, 28 aa, Artificial Sequence
  Synthetic Peptide
PEPKSCDTPPPCPRCPEPKSCDTPPPCP

SEQ ID NO: 3425 - protein, 28 aa, Artificial Sequence
  Synthetic Peptide
EPKSCDTPPPCPRCPEPKSCDTPPPCPR

SEQ ID NO: 3426 - protein, 28 aa, Artificial Sequence
  Synthetic Peptide
PKSCDTPPPCPRCPEPKSCDTPPPCPRC

SEQ ID NO: 3427 - protein, 28 aa, Artificial Sequence
  Synthetic Peptide
KSCDTPPPCPRCPEPKSCDTPPPCPRCP

SEQ ID NO: 3428 - protein, 28 aa, Artificial Sequence
  Synthetic Peptide
SCDTPPPCPRCPEPKSCDTPPPCPRCPE

SEQ ID NO: 3429 - protein, 28 aa, Artificial Sequence
  Synthetic Peptide
CDTPPPCPRCPEPKSCDTPPPCPRCPEP

SEQ ID NO: 3430 - protein, 28 aa, Artificial Sequence
  Synthetic Peptide
DTPPPCPRCPEPKSCDTPPPCPRCPEPK

SEQ ID NO: 3431 - protein, 28 aa, Artificial Sequence
  Synthetic Peptide
TPPPCPRCPEPKSCDTPPPCPRCPEPKS

SEQ ID NO: 3432 - protein, 28 aa, Artificial Sequence
  Synthetic Peptide
PPPCPRCPEPKSCDTPPPCPRCPEPKSC

SEQ ID NO: 3433 - protein, 28 aa, Artificial Sequence
  Synthetic Peptide
PPCPRCPEPKSCDTPPPCPRCPEPKSCD

SEQ ID NO: 3434 - protein, 28 aa, Artificial Sequence
  Synthetic Peptide
PCPRCPEPKSCDTPPPCPRCPEPKSCDT

SEQ ID NO: 3435 - protein, 28 aa, Artificial Sequence
  Synthetic Peptide
CPRCPEPKSCDTPPPCPRCPEPKSCDTP

SEQ ID NO: 3436 - protein, 28 aa, Artificial Sequence
  Synthetic Peptide
PRCPEPKSCDTPPPCPRCPEPKSCDTPP

SEQ ID NO: 3437 - protein, 28 aa, Artificial Sequence
  Synthetic Peptide
RCPEPKSCDTPPPCPRCPEPKSCDTPPP

SEQ ID NO: 3438 - protein, 28 aa, Artificial Sequence
  Synthetic Peptide
CPEPKSCDTPPPCPRCPEPKSCDTPPPC

SEQ ID NO: 3439 - protein, 28 aa, Artificial Sequence
  Synthetic Peptide
PEPKSCDTPPPCPRCPEPKSCDTPPPCP

SEQ ID NO: 3440 - protein, 28 aa, Artificial Sequence
  Synthetic Peptide
EPKSCDTPPPCPRCPEPKSCDTPPPCPR

SEQ ID NO: 3441 - protein, 28 aa, Artificial Sequence
  Synthetic Peptide
PKSCDTPPPCPRCPEPKSCDTPPPCPRC

SEQ ID NO: 3442 - protein, 28 aa, Artificial Sequence
  Synthetic Peptide
KSCDTPPPCPRCPEPKSCDTPPPCPRCP

SEQ ID NO: 3443 - protein, 27 aa, Artificial Sequence
  Synthetic Peptide
ELKTPLGDTTHTCPRCPEPKSCDTPPP

SEQ ID NO: 3444 - protein, 27 aa, Artificial Sequence
  Synthetic Peptide
LKTPLGDTTHTCPRCPEPKSCDTPPPC

SEQ ID NO: 3445 - protein, 27 aa, Artificial Sequence
  Synthetic Peptide
KTPLGDTTHTCPRCPEPKSCDTPPPCP

SEQ ID NO: 3446 - protein, 27 aa, Artificial Sequence
  Synthetic Peptide
TPLGDTTHTCPRCPEPKSCDTPPPCPR

SEQ ID NO: 3447 - protein, 27 aa, Artificial Sequence
  Synthetic Peptide
PLGDTTHTCPRCPEPKSCDTPPPCPRC

SEQ ID NO: 3448 - protein, 27 aa, Artificial Sequence
  Synthetic Peptide
LGDTTHTCPRCPEPKSCDTPPPCPRCP

SEQ ID NO: 3449 - protein, 27 aa, Artificial Sequence
  Synthetic Peptide
GDTTHTCPRCPEPKSCDTPPPCPRCPE

SEQ ID NO: 3450 - protein, 27 aa, Artificial Sequence
  Synthetic Peptide
DTTHTCPRCPEPKSCDTPPPCPRCPEP

SEQ ID NO: 3451 - protein, 27 aa, Artificial Sequence
  Synthetic Peptide
TTHTCPRCPEPKSCDTPPPCPRCPEPK

SEQ ID NO: 3452 - protein, 27 aa, Artificial Sequence
  Synthetic Peptide
THTCPRCPEPKSCDTPPPCPRCPEPKS

SEQ ID NO: 3453 - protein, 27 aa, Artificial Sequence
  Synthetic Peptide
HTCPRCPEPKSCDTPPPCPRCPEPKSC

SEQ ID NO: 3454 - protein, 27 aa, Artificial Sequence
  Synthetic Peptide
TCPRCPEPKSCDTPPPCPRCPEPKSCD

SEQ ID NO: 3455 - protein, 27 aa, Artificial Sequence
  Synthetic Peptide
CPRCPEPKSCDTPPPCPRCPEPKSCDT

SEQ ID NO: 3456 - protein, 27 aa, Artificial Sequence
  Synthetic Peptide
PRCPEPKSCDTPPPCPRCPEPKSCDTP

SEQ ID NO: 3457 - protein, 27 aa, Artificial Sequence
  Synthetic Peptide
RCPEPKSCDTPPPCPRCPEPKSCDTPP

SEQ ID NO: 3458 - protein, 27 aa, Artificial Sequence
  Synthetic Peptide
CPEPKSCDTPPPCPRCPEPKSCDTPPP

SEQ ID NO: 3459 - protein, 27 aa, Artificial Sequence
  Synthetic Peptide
PEPKSCDTPPPCPRCPEPKSCDTPPPC

SEQ ID NO: 3460 - protein, 27 aa, Artificial Sequence
  Synthetic Peptide
EPKSCDTPPPCPRCPEPKSCDTPPPCP

SEQ ID NO: 3461 - protein, 27 aa, Artificial Sequence
  Synthetic Peptide
PKSCDTPPPCPRCPEPKSCDTPPPCPR

SEQ ID NO: 3462 - protein, 27 aa, Artificial Sequence
  Synthetic Peptide
KSCDTPPPCPRCPEPKSCDTPPPCPRC

SEQ ID NO: 3463 - protein, 27 aa, Artificial Sequence
  Synthetic Peptide
SCDTPPPCPRCPEPKSCDTPPPCPRCP

SEQ ID NO: 3464 - protein, 27 aa, Artificial Sequence
  Synthetic Peptide
CDTPPPCPRCPEPKSCDTPPPCPRCPE

SEQ ID NO: 3465 - protein, 27 aa, Artificial Sequence
  Synthetic Peptide
DTPPPCPRCPEPKSCDTPPPCPRCPEP

SEQ ID NO: 3466 - protein, 27 aa, Artificial Sequence
  Synthetic Peptide
TPPPCPRCPEPKSCDTPPPCPRCPEPK

SEQ ID NO: 3467 - protein, 27 aa, Artificial Sequence
  Synthetic Peptide
PPPCPRCPEPKSCDTPPPCPRCPEPKS

SEQ ID NO: 3468 - protein, 27 aa, Artificial Sequence
  Synthetic Peptide
PPCPRCPEPKSCDTPPPCPRCPEPKSC

SEQ ID NO: 3469 - protein, 27 aa, Artificial Sequence
  Synthetic Peptide
PCPRCPEPKSCDTPPPCPRCPEPKSCD

SEQ ID NO: 3470 - protein, 27 aa, Artificial Sequence
  Synthetic Peptide
CPRCPEPKSCDTPPPCPRCPEPKSCDT

SEQ ID NO: 3471 - protein, 27 aa, Artificial Sequence
  Synthetic Peptide
PRCPEPKSCDTPPPCPRCPEPKSCDTP

SEQ ID NO: 3472 - protein, 27 aa, Artificial Sequence
  Synthetic Peptide
RCPEPKSCDTPPPCPRCPEPKSCDTPP

SEQ ID NO: 3473 - protein, 27 aa, Artificial Sequence
  Synthetic Peptide
CPEPKSCDTPPPCPRCPEPKSCDTPPP

SEQ ID NO: 3474 - protein, 27 aa, Artificial Sequence
  Synthetic Peptide
PEPKSCDTPPPCPRCPEPKSCDTPPPC

SEQ ID NO: 3475 - protein, 27 aa, Artificial Sequence
  Synthetic Peptide
EPKSCDTPPPCPRCPEPKSCDTPPPCP

SEQ ID NO: 3476 - protein, 27 aa, Artificial Sequence
  Synthetic Peptide
PKSCDTPPPCPRCPEPKSCDTPPPCPR

SEQ ID NO: 3477 - protein, 27 aa, Artificial Sequence
  Synthetic Peptide
KSCDTPPPCPRCPEPKSCDTPPPCPRC

SEQ ID NO: 3478 - protein, 27 aa, Artificial Sequence
  Synthetic Peptide
SCDTPPPCPRCPEPKSCDTPPPCPRCP

SEQ ID NO: 3479 - protein, 26 aa, Artificial Sequence
  Synthetic Peptide
ELKTPLGDTTHTCPRCPEPKSCDTPP

SEQ ID NO: 3480 - protein, 26 aa, Artificial Sequence
  Synthetic Peptide
LKTPLGDTTHTCPRCPEPKSCDTPPP

SEQ ID NO: 3481 - protein, 26 aa, Artificial Sequence
  Synthetic Peptide
KTPLGDTTHTCPRCPEPKSCDTPPPC

SEQ ID NO: 3482 - protein, 26 aa, Artificial Sequence
  Synthetic Peptide
TPLGDTTHTCPRCPEPKSCDTPPPCP

SEQ ID NO: 3483 - protein, 26 aa, Artificial Sequence
  Synthetic Peptide
PLGDTTHTCPRCPEPKSCDTPPPCPR

SEQ ID NO: 3484 - protein, 26 aa, Artificial Sequence
  Synthetic Peptide
LGDTTHTCPRCPEPKSCDTPPPCPRC

SEQ ID NO: 3485 - protein, 26 aa, Artificial Sequence
  Synthetic Peptide
GDTTHTCPRCPEPKSCDTPPPCPRCP

SEQ ID NO: 3486 - protein, 26 aa, Artificial Sequence
  Synthetic Peptide
DTTHTCPRCPEPKSCDTPPPCPRCPE

SEQ ID NO: 3487 - protein, 26 aa, Artificial Sequence
  Synthetic Peptide
TTHTCPRCPEPKSCDTPPPCPRCPEP

SEQ ID NO: 3488 - protein, 26 aa, Artificial Sequence
  Synthetic Peptide
THTCPRCPEPKSCDTPPPCPRCPEPK

SEQ ID NO: 3489 - protein, 26 aa, Artificial Sequence
  Synthetic Peptide
HTCPRCPEPKSCDTPPPCPRCPEPKS

SEQ ID NO: 3490 - protein, 26 aa, Artificial Sequence
  Synthetic Peptide
TCPRCPEPKSCDTPPPCPRCPEPKSC

SEQ ID NO: 3491 - protein, 26 aa, Artificial Sequence
  Synthetic Peptide
CPRCPEPKSCDTPPPCPRCPEPKSCD

SEQ ID NO: 3492 - protein, 26 aa, Artificial Sequence
  Synthetic Peptide
PRCPEPKSCDTPPPCPRCPEPKSCDT

SEQ ID NO: 3493 - protein, 26 aa, Artificial Sequence
  Synthetic Peptide
RCPEPKSCDTPPPCPRCPEPKSCDTP

SEQ ID NO: 3494 - protein, 26 aa, Artificial Sequence
  Synthetic Peptide
CPEPKSCDTPPPCPRCPEPKSCDTPP

SEQ ID NO: 3495 - protein, 26 aa, Artificial Sequence
  Synthetic Peptide
PEPKSCDTPPPCPRCPEPKSCDTPPP

SEQ ID NO: 3496 - protein, 26 aa, Artificial Sequence
  Synthetic Peptide
EPKSCDTPPPCPRCPEPKSCDTPPPC

SEQ ID NO: 3497 - protein, 26 aa, Artificial Sequence
  Synthetic Peptide
PKSCDTPPPCPRCPEPKSCDTPPPCP

SEQ ID NO: 3498 - protein, 26 aa, Artificial Sequence
  Synthetic Peptide
KSCDTPPPCPRCPEPKSCDTPPPCPR

SEQ ID NO: 3499 - protein, 26 aa, Artificial Sequence
  Synthetic Peptide
SCDTPPPCPRCPEPKSCDTPPPCPRC

SEQ ID NO: 3500 - protein, 26 aa, Artificial Sequence
  Synthetic Peptide
CDTPPPCPRCPEPKSCDTPPPCPRCP

SEQ ID NO: 3501 - protein, 26 aa, Artificial Sequence
  Synthetic Peptide
DTPPPCPRCPEPKSCDTPPPCPRCPE

SEQ ID NO: 3502 - protein, 26 aa, Artificial Sequence
  Synthetic Peptide
TPPPCPRCPEPKSCDTPPPCPRCPEP

SEQ ID NO: 3503 - protein, 26 aa, Artificial Sequence
  Synthetic Peptide
PPPCPRCPEPKSCDTPPPCPRCPEPK

SEQ ID NO: 3504 - protein, 26 aa, Artificial Sequence
  Synthetic Peptide
PPCPRCPEPKSCDTPPPCPRCPEPKS

SEQ ID NO: 3505 - protein, 26 aa, Artificial Sequence
  Synthetic Peptide
PCPRCPEPKSCDTPPPCPRCPEPKSC

SEQ ID NO: 3506 - protein, 26 aa, Artificial Sequence
  Synthetic Peptide
CPRCPEPKSCDTPPPCPRCPEPKSCD

SEQ ID NO: 3507 - protein, 26 aa, Artificial Sequence
  Synthetic Peptide
PRCPEPKSCDTPPPCPRCPEPKSCDT

SEQ ID NO: 3508 - protein, 26 aa, Artificial Sequence
  Synthetic Peptide
RCPEPKSCDTPPPCPRCPEPKSCDTP

SEQ ID NO: 3509 - protein, 26 aa, Artificial Sequence
  Synthetic Peptide
CPEPKSCDTPPPCPRCPEPKSCDTPP

SEQ ID NO: 3510 - protein, 26 aa, Artificial Sequence
  Synthetic Peptide
PEPKSCDTPPPCPRCPEPKSCDTPPP

SEQ ID NO: 3511 - protein, 26 aa, Artificial Sequence
  Synthetic Peptide
EPKSCDTPPPCPRCPEPKSCDTPPPC

SEQ ID NO: 3512 - protein, 26 aa, Artificial Sequence
  Synthetic Peptide
PKSCDTPPPCPRCPEPKSCDTPPPCP

SEQ ID NO: 3513 - protein, 26 aa, Artificial Sequence
  Synthetic Peptide
KSCDTPPPCPRCPEPKSCDTPPPCPR

SEQ ID NO: 3514 - protein, 26 aa, Artificial Sequence
  Synthetic Peptide
SCDTPPPCPRCPEPKSCDTPPPCPRC

SEQ ID NO: 3515 - protein, 26 aa, Artificial Sequence
  Synthetic Peptide
CDTPPPCPRCPEPKSCDTPPPCPRCP

SEQ ID NO: 3516 - protein, 25 aa, Artificial Sequence
  Synthetic Peptide
ELKTPLGDTTHTCPRCPEPKSCDTP

SEQ ID NO: 3517 - protein, 25 aa, Artificial Sequence
  Synthetic Peptide
LKTPLGDTTHTCPRCPEPKSCDTPP

SEQ ID NO: 3518 - protein, 25 aa, Artificial Sequence
  Synthetic Peptide
KTPLGDTTHTCPRCPEPKSCDTPPP

SEQ ID NO: 3519 - protein, 25 aa, Artificial Sequence
  Synthetic Peptide
TPLGDTTHTCPRCPEPKSCDTPPPC

SEQ ID NO: 3520 - protein, 25 aa, Artificial Sequence
  Synthetic Peptide
PLGDTTHTCPRCPEPKSCDTPPPCP

SEQ ID NO: 3521 - protein, 25 aa, Artificial Sequence
  Synthetic Peptide
LGDTTHTCPRCPEPKSCDTPPPCPR

SEQ ID NO: 3522 - protein, 25 aa, Artificial Sequence
  Synthetic Peptide
GDTTHTCPRCPEPKSCDTPPPCPRC

SEQ ID NO: 3523 - protein, 25 aa, Artificial Sequence
  Synthetic Peptide
DTTHTCPRCPEPKSCDTPPPCPRCP

SEQ ID NO: 3524 - protein, 25 aa, Artificial Sequence
  Synthetic Peptide
TTHTCPRCPEPKSCDTPPPCPRCPE

SEQ ID NO: 3525 - protein, 25 aa, Artificial Sequence
  Synthetic Peptide
THTCPRCPEPKSCDTPPPCPRCPEP

SEQ ID NO: 3526 - protein, 25 aa, Artificial Sequence
  Synthetic Peptide
HTCPRCPEPKSCDTPPPCPRCPEPK

SEQ ID NO: 3527 - protein, 25 aa, Artificial Sequence
  Synthetic Peptide
TCPRCPEPKSCDTPPPCPRCPEPKS

SEQ ID NO: 3528 - protein, 25 aa, Artificial Sequence
  Synthetic Peptide
CPRCPEPKSCDTPPPCPRCPEPKSC

SEQ ID NO: 3529 - protein, 25 aa, Artificial Sequence
  Synthetic Peptide
PRCPEPKSCDTPPPCPRCPEPKSCD

SEQ ID NO: 3530 - protein, 25 aa, Artificial Sequence
  Synthetic Peptide
RCPEPKSCDTPPPCPRCPEPKSCDT

SEQ ID NO: 3531 - protein, 25 aa, Artificial Sequence
  Synthetic Peptide
CPEPKSCDTPPPCPRCPEPKSCDTP

SEQ ID NO: 3532 - protein, 25 aa, Artificial Sequence
  Synthetic Peptide
PEPKSCDTPPPCPRCPEPKSCDTPP

SEQ ID NO: 3533 - protein, 25 aa, Artificial Sequence
  Synthetic Peptide
EPKSCDTPPPCPRCPEPKSCDTPPP

SEQ ID NO: 3534 - protein, 25 aa, Artificial Sequence
  Synthetic Peptide
PKSCDTPPPCPRCPEPKSCDTPPPC

SEQ ID NO: 3535 - protein, 25 aa, Artificial Sequence
  Synthetic Peptide
KSCDTPPPCPRCPEPKSCDTPPPCP

SEQ ID NO: 3536 - protein, 25 aa, Artificial Sequence
  Synthetic Peptide
SCDTPPPCPRCPEPKSCDTPPPCPR

SEQ ID NO: 3537 - protein, 25 aa, Artificial Sequence
  Synthetic Peptide
CDTPPPCPRCPEPKSCDTPPPCPRC

SEQ ID NO: 3538 - protein, 25 aa, Artificial Sequence
  Synthetic Peptide
DTPPPCPRCPEPKSCDTPPPCPRCP

SEQ ID NO: 3539 - protein, 25 aa, Artificial Sequence
  Synthetic Peptide
TPPPCPRCPEPKSCDTPPPCPRCPE

SEQ ID NO: 3540 - protein, 25 aa, Artificial Sequence
  Synthetic Peptide
PPPCPRCPEPKSCDTPPPCPRCPEP

SEQ ID NO: 3541 - protein, 25 aa, Artificial Sequence
  Synthetic Peptide
PPCPRCPEPKSCDTPPPCPRCPEPK

SEQ ID NO: 3542 - protein, 25 aa, Artificial Sequence
  Synthetic Peptide
PCPRCPEPKSCDTPPPCPRCPEPKS

SEQ ID NO: 3543 - protein, 25 aa, Artificial Sequence
  Synthetic Peptide
CPRCPEPKSCDTPPPCPRCPEPKSC

SEQ ID NO: 3544 - protein, 25 aa, Artificial Sequence
  Synthetic Peptide
PRCPEPKSCDTPPPCPRCPEPKSCD

SEQ ID NO: 3545 - protein, 25 aa, Artificial Sequence
  Synthetic Peptide
RCPEPKSCDTPPPCPRCPEPKSCDT

SEQ ID NO: 3546 - protein, 25 aa, Artificial Sequence
  Synthetic Peptide
CPEPKSCDTPPPCPRCPEPKSCDTP

SEQ ID NO: 3547 - protein, 25 aa, Artificial Sequence
  Synthetic Peptide
PEPKSCDTPPPCPRCPEPKSCDTPP

SEQ ID NO: 3548 - protein, 25 aa, Artificial Sequence
  Synthetic Peptide
EPKSCDTPPPCPRCPEPKSCDTPPP

SEQ ID NO: 3549 - protein, 25 aa, Artificial Sequence
  Synthetic Peptide
PKSCDTPPPCPRCPEPKSCDTPPPC

SEQ ID NO: 3550 - protein, 25 aa, Artificial Sequence
  Synthetic Peptide
KSCDTPPPCPRCPEPKSCDTPPPCP

SEQ ID NO: 3551 - protein, 25 aa, Artificial Sequence
  Synthetic Peptide
SCDTPPPCPRCPEPKSCDTPPPCPR

SEQ ID NO: 3552 - protein, 25 aa, Artificial Sequence
  Synthetic Peptide
CDTPPPCPRCPEPKSCDTPPPCPRC

SEQ ID NO: 3553 - protein, 25 aa, Artificial Sequence
  Synthetic Peptide
DTPPPCPRCPEPKSCDTPPPCPRCP

SEQ ID NO: 3554 - protein, 24 aa, Artificial Sequence
  Synthetic Peptide
ELKTPLGDTTHTCPRCPEPKSCDT

SEQ ID NO: 3555 - protein, 24 aa, Artificial Sequence
  Synthetic Peptide
LKTPLGDTTHTCPRCPEPKSCDTP

SEQ ID NO: 3556 - protein, 24 aa, Artificial Sequence
  Synthetic Peptide
KTPLGDTTHTCPRCPEPKSCDTPP

SEQ ID NO: 3557 - protein, 24 aa, Artificial Sequence
  Synthetic Peptide
TPLGDTTHTCPRCPEPKSCDTPPP

SEQ ID NO: 3558 - protein, 24 aa, Artificial Sequence
  Synthetic Peptide
PLGDTTHTCPRCPEPKSCDTPPPC

SEQ ID NO: 3559 - protein, 24 aa, Artificial Sequence
  Synthetic Peptide
LGDTTHTCPRCPEPKSCDTPPPCP

SEQ ID NO: 3560 - protein, 24 aa, Artificial Sequence
  Synthetic Peptide
GDTTHTCPRCPEPKSCDTPPPCPR

SEQ ID NO: 3561 - protein, 24 aa, Artificial Sequence
  Synthetic Peptide
DTTHTCPRCPEPKSCDTPPPCPRC

SEQ ID NO: 3562 - protein, 24 aa, Artificial Sequence
  Synthetic Peptide
TTHTCPRCPEPKSCDTPPPCPRCP

SEQ ID NO: 3563 - protein, 24 aa, Artificial Sequence
  Synthetic Peptide
THTCPRCPEPKSCDTPPPCPRCPE

SEQ ID NO: 3564 - protein, 24 aa, Artificial Sequence
  Synthetic Peptide
HTCPRCPEPKSCDTPPPCPRCPEP

SEQ ID NO: 3565 - protein, 24 aa, Artificial Sequence
  Synthetic Peptide
TCPRCPEPKSCDTPPPCPRCPEPK

SEQ ID NO: 3566 - protein, 24 aa, Artificial Sequence
  Synthetic Peptide
CPRCPEPKSCDTPPPCPRCPEPKS

SEQ ID NO: 3567 - protein, 24 aa, Artificial Sequence
  Synthetic Peptide
PRCPEPKSCDTPPPCPRCPEPKSC

SEQ ID NO: 3568 - protein, 24 aa, Artificial Sequence
  Synthetic Peptide
RCPEPKSCDTPPPCPRCPEPKSCD

SEQ ID NO: 3569 - protein, 24 aa, Artificial Sequence
  Synthetic Peptide
CPEPKSCDTPPPCPRCPEPKSCDT

SEQ ID NO: 3570 - protein, 24 aa, Artificial Sequence
  Synthetic Peptide
PEPKSCDTPPPCPRCPEPKSCDTP

SEQ ID NO: 3571 - protein, 24 aa, Artificial Sequence
  Synthetic Peptide
EPKSCDTPPPCPRCPEPKSCDTPP

SEQ ID NO: 3572 - protein, 24 aa, Artificial Sequence
  Synthetic Peptide
PKSCDTPPPCPRCPEPKSCDTPPP

SEQ ID NO: 3573 - protein, 24 aa, Artificial Sequence
  Synthetic Peptide
KSCDTPPPCPRCPEPKSCDTPPPC

SEQ ID NO: 3574 - protein, 24 aa, Artificial Sequence
  Synthetic Peptide
SCDTPPPCPRCPEPKSCDTPPPCP

SEQ ID NO: 3575 - protein, 24 aa, Artificial Sequence
  Synthetic Peptide
CDTPPPCPRCPEPKSCDTPPPCPR

SEQ ID NO: 3576 - protein, 24 aa, Artificial Sequence
  Synthetic Peptide
DTPPPCPRCPEPKSCDTPPPCPRC

SEQ ID NO: 3577 - protein, 24 aa, Artificial Sequence
  Synthetic Peptide
TPPPCPRCPEPKSCDTPPPCPRCP

SEQ ID NO: 3578 - protein, 24 aa, Artificial Sequence
  Synthetic Peptide
PPPCPRCPEPKSCDTPPPCPRCPE

SEQ ID NO: 3579 - protein, 24 aa, Artificial Sequence
  Synthetic Peptide
PPCPRCPEPKSCDTPPPCPRCPEP

SEQ ID NO: 3580 - protein, 24 aa, Artificial Sequence
  Synthetic Peptide
PCPRCPEPKSCDTPPPCPRCPEPK

SEQ ID NO: 3581 - protein, 24 aa, Artificial Sequence
  Synthetic Peptide
CPRCPEPKSCDTPPPCPRCPEPKS

SEQ ID NO: 3582 - protein, 24 aa, Artificial Sequence
  Synthetic Peptide
PRCPEPKSCDTPPPCPRCPEPKSC

SEQ ID NO: 3583 - protein, 24 aa, Artificial Sequence
  Synthetic Peptide
RCPEPKSCDTPPPCPRCPEPKSCD

SEQ ID NO: 3584 - protein, 24 aa, Artificial Sequence
  Synthetic Peptide
CPEPKSCDTPPPCPRCPEPKSCDT

SEQ ID NO: 3585 - protein, 24 aa, Artificial Sequence
  Synthetic Peptide
PEPKSCDTPPPCPRCPEPKSCDTP

SEQ ID NO: 3586 - protein, 24 aa, Artificial Sequence
  Synthetic Peptide
EPKSCDTPPPCPRCPEPKSCDTPP

SEQ ID NO: 3587 - protein, 24 aa, Artificial Sequence
  Synthetic Peptide
PKSCDTPPPCPRCPEPKSCDTPPP

SEQ ID NO: 3588 - protein, 24 aa, Artificial Sequence
  Synthetic Peptide
KSCDTPPPCPRCPEPKSCDTPPPC

SEQ ID NO: 3589 - protein, 24 aa, Artificial Sequence
  Synthetic Peptide
SCDTPPPCPRCPEPKSCDTPPPCP

SEQ ID NO: 3590 - protein, 24 aa, Artificial Sequence
  Synthetic Peptide
CDTPPPCPRCPEPKSCDTPPPCPR

SEQ ID NO: 3591 - protein, 24 aa, Artificial Sequence
  Synthetic Peptide
DTPPPCPRCPEPKSCDTPPPCPRC

SEQ ID NO: 3592 - protein, 24 aa, Artificial Sequence
  Synthetic Peptide
TPPPCPRCPEPKSCDTPPPCPRCP

SEQ ID NO: 3593 - protein, 23 aa, Artificial Sequence
  Synthetic Peptide
ELKTPLGDTTHTCPRCPEPKSCD

SEQ ID NO: 3594 - protein, 23 aa, Artificial Sequence
  Synthetic Peptide
LKTPLGDTTHTCPRCPEPKSCDT

SEQ ID NO: 3595 - protein, 23 aa, Artificial Sequence
  Synthetic Peptide
KTPLGDTTHTCPRCPEPKSCDTP

SEQ ID NO: 3596 - protein, 23 aa, Artificial Sequence
  Synthetic Peptide
TPLGDTTHTCPRCPEPKSCDTPP

SEQ ID NO: 3597 - protein, 23 aa, Artificial Sequence
  Synthetic Peptide
PLGDTTHTCPRCPEPKSCDTPPP

SEQ ID NO: 3598 - protein, 23 aa, Artificial Sequence
  Synthetic Peptide
LGDTTHTCPRCPEPKSCDTPPPC

SEQ ID NO: 3599 - protein, 23 aa, Artificial Sequence
  Synthetic Peptide
GDTTHTCPRCPEPKSCDTPPPCP

SEQ ID NO: 3600 - protein, 23 aa, Artificial Sequence
  Synthetic Peptide
DTTHTCPRCPEPKSCDTPPPCPR

SEQ ID NO: 3601 - protein, 23 aa, Artificial Sequence
  Synthetic Peptide
TTHTCPRCPEPKSCDTPPPCPRC

SEQ ID NO: 3602 - protein, 23 aa, Artificial Sequence
  Synthetic Peptide
THTCPRCPEPKSCDTPPPCPRCP

SEQ ID NO: 3603 - protein, 23 aa, Artificial Sequence
  Synthetic Peptide
HTCPRCPEPKSCDTPPPCPRCPE

SEQ ID NO: 3604 - protein, 23 aa, Artificial Sequence
  Synthetic Peptide
TCPRCPEPKSCDTPPPCPRCPEP

SEQ ID NO: 3605 - protein, 23 aa, Artificial Sequence
  Synthetic Peptide
CPRCPEPKSCDTPPPCPRCPEPK

SEQ ID NO: 3606 - protein, 23 aa, Artificial Sequence
  Synthetic Peptide
PRCPEPKSCDTPPPCPRCPEPKS

SEQ ID NO: 3607 - protein, 23 aa, Artificial Sequence
  Synthetic Peptide
RCPEPKSCDTPPPCPRCPEPKSC

SEQ ID NO: 3608 - protein, 23 aa, Artificial Sequence
  Synthetic Peptide
CPEPKSCDTPPPCPRCPEPKSCD

SEQ ID NO: 3609 - protein, 23 aa, Artificial Sequence
  Synthetic Peptide
PEPKSCDTPPPCPRCPEPKSCDT

SEQ ID NO: 3610 - protein, 23 aa, Artificial Sequence
  Synthetic Peptide
EPKSCDTPPPCPRCPEPKSCDTP

SEQ ID NO: 3611 - protein, 23 aa, Artificial Sequence
  Synthetic Peptide
PKSCDTPPPCPRCPEPKSCDTPP

SEQ ID NO: 3612 - protein, 23 aa, Artificial Sequence
  Synthetic Peptide
KSCDTPPPCPRCPEPKSCDTPPP

SEQ ID NO: 3613 - protein, 23 aa, Artificial Sequence
  Synthetic Peptide
SCDTPPPCPRCPEPKSCDTPPPC

SEQ ID NO: 3614 - protein, 23 aa, Artificial Sequence
  Synthetic Peptide
CDTPPPCPRCPEPKSCDTPPPCP

SEQ ID NO: 3615 - protein, 23 aa, Artificial Sequence
  Synthetic Peptide
DTPPPCPRCPEPKSCDTPPPCPR

SEQ ID NO: 3616 - protein, 23 aa, Artificial Sequence
  Synthetic Peptide
TPPPCPRCPEPKSCDTPPPCPRC

SEQ ID NO: 3617 - protein, 23 aa, Artificial Sequence
  Synthetic Peptide
PPPCPRCPEPKSCDTPPPCPRCP

SEQ ID NO: 3618 - protein, 23 aa, Artificial Sequence
  Synthetic Peptide
PPCPRCPEPKSCDTPPPCPRCPE

SEQ ID NO: 3619 - protein, 23 aa, Artificial Sequence
  Synthetic Peptide
PCPRCPEPKSCDTPPPCPRCPEP

SEQ ID NO: 3620 - protein, 23 aa, Artificial Sequence
  Synthetic Peptide
CPRCPEPKSCDTPPPCPRCPEPK

SEQ ID NO: 3621 - protein, 23 aa, Artificial Sequence
  Synthetic Peptide
PRCPEPKSCDTPPPCPRCPEPKS

SEQ ID NO: 3622 - protein, 23 aa, Artificial Sequence
  Synthetic Peptide
RCPEPKSCDTPPPCPRCPEPKSC

SEQ ID NO: 3623 - protein, 23 aa, Artificial Sequence
  Synthetic Peptide
CPEPKSCDTPPPCPRCPEPKSCD

SEQ ID NO: 3624 - protein, 23 aa, Artificial Sequence
  Synthetic Peptide
PEPKSCDTPPPCPRCPEPKSCDT

SEQ ID NO: 3625 - protein, 23 aa, Artificial Sequence
  Synthetic Peptide
EPKSCDTPPPCPRCPEPKSCDTP

SEQ ID NO: 3626 - protein, 23 aa, Artificial Sequence
  Synthetic Peptide
PKSCDTPPPCPRCPEPKSCDTPP

SEQ ID NO: 3627 - protein, 23 aa, Artificial Sequence
  Synthetic Peptide
KSCDTPPPCPRCPEPKSCDTPPP

SEQ ID NO: 3628 - protein, 23 aa, Artificial Sequence
  Synthetic Peptide
SCDTPPPCPRCPEPKSCDTPPPC

SEQ ID NO: 3629 - protein, 23 aa, Artificial Sequence
  Synthetic Peptide
CDTPPPCPRCPEPKSCDTPPPCP

SEQ ID NO: 3630 - protein, 23 aa, Artificial Sequence
  Synthetic Peptide
DTPPPCPRCPEPKSCDTPPPCPR

SEQ ID NO: 3631 - protein, 23 aa, Artificial Sequence
  Synthetic Peptide
TPPPCPRCPEPKSCDTPPPCPRC

SEQ ID NO: 3632 - protein, 23 aa, Artificial Sequence
  Synthetic Peptide
PPPCPRCPEPKSCDTPPPCPRCP

SEQ ID NO: 3633 - protein, 22 aa, Artificial Sequence
  Synthetic Peptide
ELKTPLGDTTHTCPRCPEPKSC

SEQ ID NO: 3634 - protein, 22 aa, Artificial Sequence
  Synthetic Peptide
LKTPLGDTTHTCPRCPEPKSCD

SEQ ID NO: 3635 - protein, 22 aa, Artificial Sequence
  Synthetic Peptide
KTPLGDTTHTCPRCPEPKSCDT

SEQ ID NO: 3636 - protein, 22 aa, Artificial Sequence
  Synthetic Peptide
TPLGDTTHTCPRCPEPKSCDTP

SEQ ID NO: 3637 - protein, 22 aa, Artificial Sequence
  Synthetic Peptide
PLGDTTHTCPRCPEPKSCDTPP

SEQ ID NO: 3638 - protein, 22 aa, Artificial Sequence
  Synthetic Peptide
LGDTTHTCPRCPEPKSCDTPPP

SEQ ID NO: 3639 - protein, 22 aa, Artificial Sequence
  Synthetic Peptide
GDTTHTCPRCPEPKSCDTPPPC

SEQ ID NO: 3640 - protein, 22 aa, Artificial Sequence
  Synthetic Peptide
DTTHTCPRCPEPKSCDTPPPCP

SEQ ID NO: 3641 - protein, 22 aa, Artificial Sequence
  Synthetic Peptide
TTHTCPRCPEPKSCDTPPPCPR

SEQ ID NO: 3642 - protein, 22 aa, Artificial Sequence
  Synthetic Peptide
THTCPRCPEPKSCDTPPPCPRC

SEQ ID NO: 3643 - protein, 22 aa, Artificial Sequence
  Synthetic Peptide
HTCPRCPEPKSCDTPPPCPRCP

SEQ ID NO: 3644 - protein, 22 aa, Artificial Sequence
  Synthetic Peptide
TCPRCPEPKSCDTPPPCPRCPE

SEQ ID NO: 3645 - protein, 22 aa, Artificial Sequence
  Synthetic Peptide
CPRCPEPKSCDTPPPCPRCPEP

SEQ ID NO: 3646 - protein, 22 aa, Artificial Sequence
  Synthetic Peptide
PRCPEPKSCDTPPPCPRCPEPK

SEQ ID NO: 3647 - protein, 22 aa, Artificial Sequence
  Synthetic Peptide
RCPEPKSCDTPPPCPRCPEPKS

SEQ ID NO: 3648 - protein, 22 aa, Artificial Sequence
  Synthetic Peptide
CPEPKSCDTPPPCPRCPEPKSC

SEQ ID NO: 3649 - protein, 22 aa, Artificial Sequence
  Synthetic Peptide
PEPKSCDTPPPCPRCPEPKSCD

SEQ ID NO: 3650 - protein, 22 aa, Artificial Sequence
  Synthetic Peptide
EPKSCDTPPPCPRCPEPKSCDT

SEQ ID NO: 3651 - protein, 22 aa, Artificial Sequence
  Synthetic Peptide
PKSCDTPPPCPRCPEPKSCDTP

SEQ ID NO: 3652 - protein, 22 aa, Artificial Sequence
  Synthetic Peptide
KSCDTPPPCPRCPEPKSCDTPP

SEQ ID NO: 3653 - protein, 22 aa, Artificial Sequence
  Synthetic Peptide
SCDTPPPCPRCPEPKSCDTPPP

SEQ ID NO: 3654 - protein, 22 aa, Artificial Sequence
  Synthetic Peptide
CDTPPPCPRCPEPKSCDTPPPC

SEQ ID NO: 3655 - protein, 22 aa, Artificial Sequence
  Synthetic Peptide
DTPPPCPRCPEPKSCDTPPPCP

SEQ ID NO: 3656 - protein, 22 aa, Artificial Sequence
  Synthetic Peptide
TPPPCPRCPEPKSCDTPPPCPR

SEQ ID NO: 3657 - protein, 22 aa, Artificial Sequence
  Synthetic Peptide
PPPCPRCPEPKSCDTPPPCPRC

SEQ ID NO: 3658 - protein, 22 aa, Artificial Sequence
  Synthetic Peptide
PPCPRCPEPKSCDTPPPCPRCP

SEQ ID NO: 3659 - protein, 22 aa, Artificial Sequence
  Synthetic Peptide
PCPRCPEPKSCDTPPPCPRCPE

SEQ ID NO: 3660 - protein, 22 aa, Artificial Sequence
  Synthetic Peptide
CPRCPEPKSCDTPPPCPRCPEP

SEQ ID NO: 3661 - protein, 22 aa, Artificial Sequence
  Synthetic Peptide
PRCPEPKSCDTPPPCPRCPEPK

SEQ ID NO: 3662 - protein, 22 aa, Artificial Sequence
  Synthetic Peptide
RCPEPKSCDTPPPCPRCPEPKS

SEQ ID NO: 3663 - protein, 22 aa, Artificial Sequence
  Synthetic Peptide
CPEPKSCDTPPPCPRCPEPKSC

SEQ ID NO: 3664 - protein, 22 aa, Artificial Sequence
  Synthetic Peptide
PEPKSCDTPPPCPRCPEPKSCD

SEQ ID NO: 3665 - protein, 22 aa, Artificial Sequence
  Synthetic Peptide
EPKSCDTPPPCPRCPEPKSCDT

SEQ ID NO: 3666 - protein, 22 aa, Artificial Sequence
  Synthetic Peptide
PKSCDTPPPCPRCPEPKSCDTP

SEQ ID NO: 3667 - protein, 22 aa, Artificial Sequence
  Synthetic Peptide
KSCDTPPPCPRCPEPKSCDTPP

SEQ ID NO: 3668 - protein, 22 aa, Artificial Sequence
  Synthetic Peptide
SCDTPPPCPRCPEPKSCDTPPP

SEQ ID NO: 3669 - protein, 22 aa, Artificial Sequence
  Synthetic Peptide
CDTPPPCPRCPEPKSCDTPPPC

SEQ ID NO: 3670 - protein, 22 aa, Artificial Sequence
  Synthetic Peptide
DTPPPCPRCPEPKSCDTPPPCP

SEQ ID NO: 3671 - protein, 22 aa, Artificial Sequence
  Synthetic Peptide
TPPPCPRCPEPKSCDTPPPCPR

SEQ ID NO: 3672 - protein, 22 aa, Artificial Sequence
  Synthetic Peptide
PPPCPRCPEPKSCDTPPPCPRC

SEQ ID NO: 3673 - protein, 22 aa, Artificial Sequence
  Synthetic Peptide
PPCPRCPEPKSCDTPPPCPRCP

SEQ ID NO: 3674 - protein, 21 aa, Artificial Sequence
  Synthetic Peptide
ELKTPLGDTTHTCPRCPEPKS

SEQ ID NO: 3675 - protein, 21 aa, Artificial Sequence
  Synthetic Peptide
LKTPLGDTTHTCPRCPEPKSC

SEQ ID NO: 3676 - protein, 21 aa, Artificial Sequence
  Synthetic Peptide
KTPLGDTTHTCPRCPEPKSCD

SEQ ID NO: 3677 - protein, 21 aa, Artificial Sequence
  Synthetic Peptide
TPLGDTTHTCPRCPEPKSCDT

SEQ ID NO: 3678 - protein, 21 aa, Artificial Sequence
  Synthetic Peptide
PLGDTTHTCPRCPEPKSCDTP

SEQ ID NO: 3679 - protein, 21 aa, Artificial Sequence
  Synthetic Peptide
LGDTTHTCPRCPEPKSCDTPP

SEQ ID NO: 3680 - protein, 21 aa, Artificial Sequence
  Synthetic Peptide
GDTTHTCPRCPEPKSCDTPPP

SEQ ID NO: 3681 - protein, 21 aa, Artificial Sequence
  Synthetic Peptide
DTTHTCPRCPEPKSCDTPPPC

SEQ ID NO: 3682 - protein, 21 aa, Artificial Sequence
  Synthetic Peptide
TTHTCPRCPEPKSCDTPPPCP

SEQ ID NO: 3683 - protein, 21 aa, Artificial Sequence
  Synthetic Peptide
THTCPRCPEPKSCDTPPPCPR

SEQ ID NO: 3684 - protein, 21 aa, Artificial Sequence
  Synthetic Peptide
HTCPRCPEPKSCDTPPPCPRC

SEQ ID NO: 3685 - protein, 21 aa, Artificial Sequence
  Synthetic Peptide
TCPRCPEPKSCDTPPPCPRCP

SEQ ID NO: 3686 - protein, 21 aa, Artificial Sequence
  Synthetic Peptide
CPRCPEPKSCDTPPPCPRCPE

SEQ ID NO: 3687 - protein, 21 aa, Artificial Sequence
  Synthetic Peptide
PRCPEPKSCDTPPPCPRCPEP

SEQ ID NO: 3688 - protein, 21 aa, Artificial Sequence
  Synthetic Peptide
RCPEPKSCDTPPPCPRCPEPK

SEQ ID NO: 3689 - protein, 21 aa, Artificial Sequence
  Synthetic Peptide
CPEPKSCDTPPPCPRCPEPKS

SEQ ID NO: 3690 - protein, 21 aa, Artificial Sequence
  Synthetic Peptide
PEPKSCDTPPPCPRCPEPKSC

SEQ ID NO: 3691 - protein, 21 aa, Artificial Sequence
  Synthetic Peptide
EPKSCDTPPPCPRCPEPKSCD

SEQ ID NO: 3692 - protein, 21 aa, Artificial Sequence
  Synthetic Peptide
PKSCDTPPPCPRCPEPKSCDT

SEQ ID NO: 3693 - protein, 21 aa, Artificial Sequence
  Synthetic Peptide
KSCDTPPPCPRCPEPKSCDTP

SEQ ID NO: 3694 - protein, 21 aa, Artificial Sequence
  Synthetic Peptide
SCDTPPPCPRCPEPKSCDTPP

SEQ ID NO: 3695 - protein, 21 aa, Artificial Sequence
  Synthetic Peptide
CDTPPPCPRCPEPKSCDTPPP

SEQ ID NO: 3696 - protein, 21 aa, Artificial Sequence
  Synthetic Peptide
DTPPPCPRCPEPKSCDTPPPC

SEQ ID NO: 3697 - protein, 21 aa, Artificial Sequence
  Synthetic Peptide
TPPPCPRCPEPKSCDTPPPCP

SEQ ID NO: 3698 - protein, 21 aa, Artificial Sequence
  Synthetic Peptide
PPPCPRCPEPKSCDTPPPCPR

SEQ ID NO: 3699 - protein, 21 aa, Artificial Sequence
  Synthetic Peptide
PPCPRCPEPKSCDTPPPCPRC

SEQ ID NO: 3700 - protein, 21 aa, Artificial Sequence
  Synthetic Peptide
PCPRCPEPKSCDTPPPCPRCP

SEQ ID NO: 3701 - protein, 21 aa, Artificial Sequence
  Synthetic Peptide
CPRCPEPKSCDTPPPCPRCPE

SEQ ID NO: 3702 - protein, 21 aa, Artificial Sequence
  Synthetic Peptide
PRCPEPKSCDTPPPCPRCPEP

SEQ ID NO: 3703 - protein, 21 aa, Artificial Sequence
  Synthetic Peptide
RCPEPKSCDTPPPCPRCPEPK

SEQ ID NO: 3704 - protein, 21 aa, Artificial Sequence
  Synthetic Peptide
CPEPKSCDTPPPCPRCPEPKS

SEQ ID NO: 3705 - protein, 21 aa, Artificial Sequence
  Synthetic Peptide
PEPKSCDTPPPCPRCPEPKSC

SEQ ID NO: 3706 - protein, 21 aa, Artificial Sequence
  Synthetic Peptide
EPKSCDTPPPCPRCPEPKSCD

SEQ ID NO: 3707 - protein, 21 aa, Artificial Sequence
  Synthetic Peptide
PKSCDTPPPCPRCPEPKSCDT

SEQ ID NO: 3708 - protein, 21 aa, Artificial Sequence
  Synthetic Peptide
KSCDTPPPCPRCPEPKSCDTP

SEQ ID NO: 3709 - protein, 21 aa, Artificial Sequence
  Synthetic Peptide
SCDTPPPCPRCPEPKSCDTPP

SEQ ID NO: 3710 - protein, 21 aa, Artificial Sequence
  Synthetic Peptide
CDTPPPCPRCPEPKSCDTPPP

SEQ ID NO: 3711 - protein, 21 aa, Artificial Sequence
  Synthetic Peptide
DTPPPCPRCPEPKSCDTPPPC

SEQ ID NO: 3712 - protein, 21 aa, Artificial Sequence
  Synthetic Peptide
TPPPCPRCPEPKSCDTPPPCP

SEQ ID NO: 3713 - protein, 21 aa, Artificial Sequence
  Synthetic Peptide
PPPCPRCPEPKSCDTPPPCPR

SEQ ID NO: 3714 - protein, 21 aa, Artificial Sequence
  Synthetic Peptide
PPCPRCPEPKSCDTPPPCPRC

SEQ ID NO: 3715 - protein, 21 aa, Artificial Sequence
  Synthetic Peptide
PCPRCPEPKSCDTPPPCPRCP

SEQ ID NO: 3716 - protein, 20 aa, Artificial Sequence
  Synthetic Peptide
ELKTPLGDTTHTCPRCPEPK

SEQ ID NO: 3717 - protein, 20 aa, Artificial Sequence
  Synthetic Peptide
LKTPLGDTTHTCPRCPEPKS

SEQ ID NO: 3718 - protein, 20 aa, Artificial Sequence
  Synthetic Peptide
KTPLGDTTHTCPRCPEPKSC

SEQ ID NO: 3719 - protein, 20 aa, Artificial Sequence
  Synthetic Peptide
TPLGDTTHTCPRCPEPKSCD

SEQ ID NO: 3720 - protein, 20 aa, Artificial Sequence
  Synthetic Peptide
PLGDTTHTCPRCPEPKSCDT

SEQ ID NO: 3721 - protein, 20 aa, Artificial Sequence
  Synthetic Peptide
LGDTTHTCPRCPEPKSCDTP

SEQ ID NO: 3722 - protein, 20 aa, Artificial Sequence
  Synthetic Peptide
GDTTHTCPRCPEPKSCDTPP

SEQ ID NO: 3723 - protein, 20 aa, Artificial Sequence
  Synthetic Peptide
DTTHTCPRCPEPKSCDTPPP

SEQ ID NO: 3724 - protein, 20 aa, Artificial Sequence
  Synthetic Peptide
TTHTCPRCPEPKSCDTPPPC

SEQ ID NO: 3725 - protein, 20 aa, Artificial Sequence
  Synthetic Peptide
THTCPRCPEPKSCDTPPPCP

SEQ ID NO: 3726 - protein, 20 aa, Artificial Sequence
  Synthetic Peptide
HTCPRCPEPKSCDTPPPCPR

SEQ ID NO: 3727 - protein, 20 aa, Artificial Sequence
  Synthetic Peptide
TCPRCPEPKSCDTPPPCPRC

SEQ ID NO: 3728 - protein, 20 aa, Artificial Sequence
  Synthetic Peptide
CPRCPEPKSCDTPPPCPRCP

SEQ ID NO: 3729 - protein, 20 aa, Artificial Sequence
  Synthetic Peptide
PRCPEPKSCDTPPPCPRCPE

SEQ ID NO: 3730 - protein, 20 aa, Artificial Sequence
  Synthetic Peptide
RCPEPKSCDTPPPCPRCPEP

SEQ ID NO: 3731 - protein, 20 aa, Artificial Sequence
  Synthetic Peptide
CPEPKSCDTPPPCPRCPEPK

SEQ ID NO: 3732 - protein, 20 aa, Artificial Sequence
  Synthetic Peptide
PEPKSCDTPPPCPRCPEPKS

SEQ ID NO: 3733 - protein, 20 aa, Artificial Sequence
  Synthetic Peptide
EPKSCDTPPPCPRCPEPKSC

SEQ ID NO: 3734 - protein, 20 aa, Artificial Sequence
  Synthetic Peptide
PKSCDTPPPCPRCPEPKSCD

SEQ ID NO: 3735 - protein, 20 aa, Artificial Sequence
  Synthetic Peptide
KSCDTPPPCPRCPEPKSCDT

SEQ ID NO: 3736 - protein, 20 aa, Artificial Sequence
  Synthetic Peptide
SCDTPPPCPRCPEPKSCDTP

SEQ ID NO: 3737 - protein, 20 aa, Artificial Sequence
  Synthetic Peptide
CDTPPPCPRCPEPKSCDTPP

SEQ ID NO: 3738 - protein, 20 aa, Artificial Sequence
  Synthetic Peptide
DTPPPCPRCPEPKSCDTPPP

SEQ ID NO: 3739 - protein, 20 aa, Artificial Sequence
  Synthetic Peptide
TPPPCPRCPEPKSCDTPPPC

SEQ ID NO: 3740 - protein, 20 aa, Artificial Sequence
  Synthetic Peptide
PPPCPRCPEPKSCDTPPPCP

SEQ ID NO: 3741 - protein, 20 aa, Artificial Sequence
  Synthetic Peptide
PPCPRCPEPKSCDTPPPCPR

SEQ ID NO: 3742 - protein, 20 aa, Artificial Sequence
  Synthetic Peptide
PCPRCPEPKSCDTPPPCPRC

SEQ ID NO: 3743 - protein, 20 aa, Artificial Sequence
  Synthetic Peptide
CPRCPEPKSCDTPPPCPRCP

SEQ ID NO: 3744 - protein, 20 aa, Artificial Sequence
  Synthetic Peptide
PRCPEPKSCDTPPPCPRCPE

SEQ ID NO: 3745 - protein, 20 aa, Artificial Sequence
  Synthetic Peptide
RCPEPKSCDTPPPCPRCPEP

SEQ ID NO: 3746 - protein, 20 aa, Artificial Sequence
  Synthetic Peptide
CPEPKSCDTPPPCPRCPEPK

SEQ ID NO: 3747 - protein, 20 aa, Artificial Sequence
  Synthetic Peptide
PEPKSCDTPPPCPRCPEPKS

SEQ ID NO: 3748 - protein, 20 aa, Artificial Sequence
  Synthetic Peptide
EPKSCDTPPPCPRCPEPKSC

SEQ ID NO: 3749 - protein, 20 aa, Artificial Sequence
  Synthetic Peptide
PKSCDTPPPCPRCPEPKSCD

SEQ ID NO: 3750 - protein, 20 aa, Artificial Sequence
  Synthetic Peptide
KSCDTPPPCPRCPEPKSCDT

SEQ ID NO: 3751 - protein, 20 aa, Artificial Sequence
  Synthetic Peptide
SCDTPPPCPRCPEPKSCDTP

SEQ ID NO: 3752 - protein, 20 aa, Artificial Sequence
  Synthetic Peptide
CDTPPPCPRCPEPKSCDTPP

SEQ ID NO: 3753 - protein, 20 aa, Artificial Sequence
  Synthetic Peptide
DTPPPCPRCPEPKSCDTPPP

SEQ ID NO: 3754 - protein, 20 aa, Artificial Sequence
  Synthetic Peptide
TPPPCPRCPEPKSCDTPPPC

SEQ ID NO: 3755 - protein, 20 aa, Artificial Sequence
  Synthetic Peptide
PPPCPRCPEPKSCDTPPPCP

SEQ ID NO: 3756 - protein, 20 aa, Artificial Sequence
  Synthetic Peptide
PPCPRCPEPKSCDTPPPCPR

SEQ ID NO: 3757 - protein, 20 aa, Artificial Sequence
  Synthetic Peptide
PCPRCPEPKSCDTPPPCPRC

SEQ ID NO: 3758 - protein, 20 aa, Artificial Sequence
  Synthetic Peptide
CPRCPEPKSCDTPPPCPRCP

SEQ ID NO: 3759 - protein, 19 aa, Artificial Sequence
  Synthetic Peptide
ELKTPLGDTTHTCPRCPEP

SEQ ID NO: 3760 - protein, 19 aa, Artificial Sequence
  Synthetic Peptide
LKTPLGDTTHTCPRCPEPK

SEQ ID NO: 3761 - protein, 19 aa, Artificial Sequence
  Synthetic Peptide
KTPLGDTTHTCPRCPEPKS

SEQ ID NO: 3762 - protein, 19 aa, Artificial Sequence
  Synthetic Peptide
TPLGDTTHTCPRCPEPKSC

SEQ ID NO: 3763 - protein, 19 aa, Artificial Sequence
  Synthetic Peptide
PLGDTTHTCPRCPEPKSCD

SEQ ID NO: 3764 - protein, 19 aa, Artificial Sequence
  Synthetic Peptide
LGDTTHTCPRCPEPKSCDT

SEQ ID NO: 3765 - protein, 19 aa, Artificial Sequence
  Synthetic Peptide
GDTTHTCPRCPEPKSCDTP

SEQ ID NO: 3766 - protein, 19 aa, Artificial Sequence
  Synthetic Peptide
DTTHTCPRCPEPKSCDTPP

SEQ ID NO: 3767 - protein, 19 aa, Artificial Sequence
  Synthetic Peptide
TTHTCPRCPEPKSCDTPPP

SEQ ID NO: 3768 - protein, 19 aa, Artificial Sequence
  Synthetic Peptide
THTCPRCPEPKSCDTPPPC

SEQ ID NO: 3769 - protein, 19 aa, Artificial Sequence
  Synthetic Peptide
HTCPRCPEPKSCDTPPPCP

SEQ ID NO: 3770 - protein, 19 aa, Artificial Sequence
  Synthetic Peptide
TCPRCPEPKSCDTPPPCPR

SEQ ID NO: 3771 - protein, 19 aa, Artificial Sequence
  Synthetic Peptide
CPRCPEPKSCDTPPPCPRC

SEQ ID NO: 3772 - protein, 19 aa, Artificial Sequence
  Synthetic Peptide
PRCPEPKSCDTPPPCPRCP

SEQ ID NO: 3773 - protein, 19 aa, Artificial Sequence
  Synthetic Peptide
RCPEPKSCDTPPPCPRCPE

SEQ ID NO: 3774 - protein, 19 aa, Artificial Sequence
  Synthetic Peptide
CPEPKSCDTPPPCPRCPEP

SEQ ID NO: 3775 - protein, 19 aa, Artificial Sequence
  Synthetic Peptide
PEPKSCDTPPPCPRCPEPK

SEQ ID NO: 3776 - protein, 19 aa, Artificial Sequence
  Synthetic Peptide
EPKSCDTPPPCPRCPEPKS

SEQ ID NO: 3777 - protein, 19 aa, Artificial Sequence
  Synthetic Peptide
PKSCDTPPPCPRCPEPKSC

SEQ ID NO: 3778 - protein, 19 aa, Artificial Sequence
  Synthetic Peptide
KSCDTPPPCPRCPEPKSCD

SEQ ID NO: 3779 - protein, 19 aa, Artificial Sequence
  Synthetic Peptide
SCDTPPPCPRCPEPKSCDT

SEQ ID NO: 3780 - protein, 19 aa, Artificial Sequence
  Synthetic Peptide
CDTPPPCPRCPEPKSCDTP

SEQ ID NO: 3781 - protein, 19 aa, Artificial Sequence
  Synthetic Peptide
DTPPPCPRCPEPKSCDTPP

SEQ ID NO: 3782 - protein, 19 aa, Artificial Sequence
  Synthetic Peptide
TPPPCPRCPEPKSCDTPPP

SEQ ID NO: 3783 - protein, 19 aa, Artificial Sequence
  Synthetic Peptide
PPPCPRCPEPKSCDTPPPC

SEQ ID NO: 3784 - protein, 19 aa, Artificial Sequence
  Synthetic Peptide
PPCPRCPEPKSCDTPPPCP

SEQ ID NO: 3785 - protein, 19 aa, Artificial Sequence
  Synthetic Peptide
PCPRCPEPKSCDTPPPCPR

SEQ ID NO: 3786 - protein, 19 aa, Artificial Sequence
  Synthetic Peptide
CPRCPEPKSCDTPPPCPRC

SEQ ID NO: 3787 - protein, 19 aa, Artificial Sequence
  Synthetic Peptide
PRCPEPKSCDTPPPCPRCP

SEQ ID NO: 3788 - protein, 19 aa, Artificial Sequence
  Synthetic Peptide
RCPEPKSCDTPPPCPRCPE

SEQ ID NO: 3789 - protein, 19 aa, Artificial Sequence
  Synthetic Peptide
CPEPKSCDTPPPCPRCPEP

SEQ ID NO: 3790 - protein, 19 aa, Artificial Sequence
  Synthetic Peptide
PEPKSCDTPPPCPRCPEPK

SEQ ID NO: 3791 - protein, 19 aa, Artificial Sequence
  Synthetic Peptide
EPKSCDTPPPCPRCPEPKS

SEQ ID NO: 3792 - protein, 19 aa, Artificial Sequence
  Synthetic Peptide
PKSCDTPPPCPRCPEPKSC

SEQ ID NO: 3793 - protein, 19 aa, Artificial Sequence
  Synthetic Peptide
KSCDTPPPCPRCPEPKSCD

SEQ ID NO: 3794 - protein, 19 aa, Artificial Sequence
  Synthetic Peptide
SCDTPPPCPRCPEPKSCDT

SEQ ID NO: 3795 - protein, 19 aa, Artificial Sequence
  Synthetic Peptide
CDTPPPCPRCPEPKSCDTP

SEQ ID NO: 3796 - protein, 19 aa, Artificial Sequence
  Synthetic Peptide
DTPPPCPRCPEPKSCDTPP

SEQ ID NO: 3797 - protein, 19 aa, Artificial Sequence
  Synthetic Peptide
TPPPCPRCPEPKSCDTPPP

SEQ ID NO: 3798 - protein, 19 aa, Artificial Sequence
  Synthetic Peptide
PPPCPRCPEPKSCDTPPPC

SEQ ID NO: 3799 - protein, 19 aa, Artificial Sequence
  Synthetic Peptide
PPCPRCPEPKSCDTPPPCP

SEQ ID NO: 3800 - protein, 19 aa, Artificial Sequence
  Synthetic Peptide
PCPRCPEPKSCDTPPPCPR

SEQ ID NO: 3801 - protein, 19 aa, Artificial Sequence
  Synthetic Peptide
CPRCPEPKSCDTPPPCPRC

SEQ ID NO: 3802 - protein, 19 aa, Artificial Sequence
  Synthetic Peptide
PRCPEPKSCDTPPPCPRCP

SEQ ID NO: 3803 - protein, 18 aa, Artificial Sequence
  Synthetic Peptide
ELKTPLGDTTHTCPRCPE

SEQ ID NO: 3804 - protein, 18 aa, Artificial Sequence
  Synthetic Peptide
LKTPLGDTTHTCPRCPEP

SEQ ID NO: 3805 - protein, 18 aa, Artificial Sequence
  Synthetic Peptide
KTPLGDTTHTCPRCPEPK

SEQ ID NO: 3806 - protein, 18 aa, Artificial Sequence
  Synthetic Peptide
TPLGDTTHTCPRCPEPKS

SEQ ID NO: 3807 - protein, 18 aa, Artificial Sequence
  Synthetic Peptide
PLGDTTHTCPRCPEPKSC

SEQ ID NO: 3808 - protein, 18 aa, Artificial Sequence
  Synthetic Peptide
LGDTTHTCPRCPEPKSCD

SEQ ID NO: 3809 - protein, 18 aa, Artificial Sequence
  Synthetic Peptide
GDTTHTCPRCPEPKSCDT

SEQ ID NO: 3810 - protein, 18 aa, Artificial Sequence
  Synthetic Peptide
DTTHTCPRCPEPKSCDTP

SEQ ID NO: 3811 - protein, 18 aa, Artificial Sequence
  Synthetic Peptide
TTHTCPRCPEPKSCDTPP

SEQ ID NO: 3812 - protein, 18 aa, Artificial Sequence
  Synthetic Peptide
THTCPRCPEPKSCDTPPP

SEQ ID NO: 3813 - protein, 18 aa, Artificial Sequence
  Synthetic Peptide
HTCPRCPEPKSCDTPPPC

SEQ ID NO: 3814 - protein, 18 aa, Artificial Sequence
  Synthetic Peptide
TCPRCPEPKSCDTPPPCP

SEQ ID NO: 3815 - protein, 18 aa, Artificial Sequence
  Synthetic Peptide
CPRCPEPKSCDTPPPCPR

SEQ ID NO: 3816 - protein, 18 aa, Artificial Sequence
  Synthetic Peptide
PRCPEPKSCDTPPPCPRC

SEQ ID NO: 3817 - protein, 18 aa, Artificial Sequence
  Synthetic Peptide
RCPEPKSCDTPPPCPRCP

SEQ ID NO: 3818 - protein, 18 aa, Artificial Sequence
  Synthetic Peptide
CPEPKSCDTPPPCPRCPE

SEQ ID NO: 3819 - protein, 18 aa, Artificial Sequence
  Synthetic Peptide
PEPKSCDTPPPCPRCPEP

SEQ ID NO: 3820 - protein, 18 aa, Artificial Sequence
  Synthetic Peptide
EPKSCDTPPPCPRCPEPK

SEQ ID NO: 3821 - protein, 18 aa, Artificial Sequence
  Synthetic Peptide
PKSCDTPPPCPRCPEPKS

SEQ ID NO: 3822 - protein, 18 aa, Artificial Sequence
  Synthetic Peptide
KSCDTPPPCPRCPEPKSC

SEQ ID NO: 3823 - protein, 18 aa, Artificial Sequence
  Synthetic Peptide
SCDTPPPCPRCPEPKSCD

SEQ ID NO: 3824 - protein, 18 aa, Artificial Sequence
  Synthetic Peptide
CDTPPPCPRCPEPKSCDT

SEQ ID NO: 3825 - protein, 18 aa, Artificial Sequence
  Synthetic Peptide
DTPPPCPRCPEPKSCDTP

SEQ ID NO: 3826 - protein, 18 aa, Artificial Sequence
  Synthetic Peptide
TPPPCPRCPEPKSCDTPP

SEQ ID NO: 3827 - protein, 18 aa, Artificial Sequence
  Synthetic Peptide
PPPCPRCPEPKSCDTPPP

SEQ ID NO: 3828 - protein, 18 aa, Artificial Sequence
  Synthetic Peptide
PPCPRCPEPKSCDTPPPC

SEQ ID NO: 3829 - protein, 18 aa, Artificial Sequence
  Synthetic Peptide
PCPRCPEPKSCDTPPPCP

SEQ ID NO: 3830 - protein, 18 aa, Artificial Sequence
  Synthetic Peptide
CPRCPEPKSCDTPPPCPR

SEQ ID NO: 3831 - protein, 18 aa, Artificial Sequence
  Synthetic Peptide
PRCPEPKSCDTPPPCPRC

SEQ ID NO: 3832 - protein, 18 aa, Artificial Sequence
  Synthetic Peptide
RCPEPKSCDTPPPCPRCP

SEQ ID NO: 3833 - protein, 18 aa, Artificial Sequence
  Synthetic Peptide
CPEPKSCDTPPPCPRCPE

SEQ ID NO: 3834 - protein, 18 aa, Artificial Sequence
  Synthetic Peptide
PEPKSCDTPPPCPRCPEP

SEQ ID NO: 3835 - protein, 18 aa, Artificial Sequence
  Synthetic Peptide
EPKSCDTPPPCPRCPEPK

SEQ ID NO: 3836 - protein, 18 aa, Artificial Sequence
  Synthetic Peptide
PKSCDTPPPCPRCPEPKS

SEQ ID NO: 3837 - protein, 18 aa, Artificial Sequence
  Synthetic Peptide
KSCDTPPPCPRCPEPKSC

SEQ ID NO: 3838 - protein, 18 aa, Artificial Sequence
  Synthetic Peptide
SCDTPPPCPRCPEPKSCD

SEQ ID NO: 3839 - protein, 18 aa, Artificial Sequence
  Synthetic Peptide
CDTPPPCPRCPEPKSCDT

SEQ ID NO: 3840 - protein, 18 aa, Artificial Sequence
  Synthetic Peptide
DTPPPCPRCPEPKSCDTP

SEQ ID NO: 3841 - protein, 18 aa, Artificial Sequence
  Synthetic Peptide
TPPPCPRCPEPKSCDTPP

SEQ ID NO: 3842 - protein, 18 aa, Artificial Sequence
  Synthetic Peptide
PPPCPRCPEPKSCDTPPP

SEQ ID NO: 3843 - protein, 18 aa, Artificial Sequence
  Synthetic Peptide
PPCPRCPEPKSCDTPPPC

SEQ ID NO: 3844 - protein, 18 aa, Artificial Sequence
  Synthetic Peptide
PCPRCPEPKSCDTPPPCP

SEQ ID NO: 3845 - protein, 18 aa, Artificial Sequence
  Synthetic Peptide
CPRCPEPKSCDTPPPCPR

SEQ ID NO: 3846 - protein, 18 aa, Artificial Sequence
  Synthetic Peptide
PRCPEPKSCDTPPPCPRC

SEQ ID NO: 3847 - protein, 18 aa, Artificial Sequence
  Synthetic Peptide
RCPEPKSCDTPPPCPRCP

SEQ ID NO: 3848 - protein, 17 aa, Artificial Sequence
  Synthetic Peptide
ELKTPLGDTTHTCPRCP

SEQ ID NO: 3849 - protein, 17 aa, Artificial Sequence
  Synthetic Peptide
LKTPLGDTTHTCPRCPE

SEQ ID NO: 3850 - protein, 17 aa, Artificial Sequence
  Synthetic Peptide
KTPLGDTTHTCPRCPEP

SEQ ID NO: 3851 - protein, 17 aa, Artificial Sequence
  Synthetic Peptide
TPLGDTTHTCPRCPEPK

SEQ ID NO: 3852 - protein, 17 aa, Artificial Sequence
  Synthetic Peptide
PLGDTTHTCPRCPEPKS

SEQ ID NO: 3853 - protein, 17 aa, Artificial Sequence
  Synthetic Peptide
LGDTTHTCPRCPEPKSC

SEQ ID NO: 3854 - protein, 17 aa, Artificial Sequence
  Synthetic Peptide
GDTTHTCPRCPEPKSCD

SEQ ID NO: 3855 - protein, 17 aa, Artificial Sequence
  Synthetic Peptide
DTTHTCPRCPEPKSCDT

SEQ ID NO: 3856 - protein, 17 aa, Artificial Sequence
  Synthetic Peptide
TTHTCPRCPEPKSCDTP

SEQ ID NO: 3857 - protein, 17 aa, Artificial Sequence
  Synthetic Peptide
THTCPRCPEPKSCDTPP

SEQ ID NO: 3858 - protein, 17 aa, Artificial Sequence
  Synthetic Peptide
HTCPRCPEPKSCDTPPP

SEQ ID NO: 3859 - protein, 17 aa, Artificial Sequence
  Synthetic Peptide
TCPRCPEPKSCDTPPPC

SEQ ID NO: 3860 - protein, 17 aa, Artificial Sequence
  Synthetic Peptide
CPRCPEPKSCDTPPPCP

SEQ ID NO: 3861 - protein, 17 aa, Artificial Sequence
  Synthetic Peptide
PRCPEPKSCDTPPPCPR

SEQ ID NO: 3862 - protein, 17 aa, Artificial Sequence
  Synthetic Peptide
RCPEPKSCDTPPPCPRC

SEQ ID NO: 3863 - protein, 17 aa, Artificial Sequence
  Synthetic Peptide
CPEPKSCDTPPPCPRCP

SEQ ID NO: 3864 - protein, 17 aa, Artificial Sequence
  Synthetic Peptide
PEPKSCDTPPPCPRCPE

SEQ ID NO: 3865 - protein, 17 aa, Artificial Sequence
  Synthetic Peptide
EPKSCDTPPPCPRCPEP

SEQ ID NO: 3866 - protein, 17 aa, Artificial Sequence
  Synthetic Peptide
PKSCDTPPPCPRCPEPK

SEQ ID NO: 3867 - protein, 17 aa, Artificial Sequence
  Synthetic Peptide
KSCDTPPPCPRCPEPKS

SEQ ID NO: 3868 - protein, 17 aa, Artificial Sequence
  Synthetic Peptide
SCDTPPPCPRCPEPKSC

SEQ ID NO: 3869 - protein, 17 aa, Artificial Sequence
  Synthetic Peptide
CDTPPPCPRCPEPKSCD

SEQ ID NO: 3870 - protein, 17 aa, Artificial Sequence
  Synthetic Peptide
DTPPPCPRCPEPKSCDT

SEQ ID NO: 3871 - protein, 17 aa, Artificial Sequence
  Synthetic Peptide
TPPPCPRCPEPKSCDTP

SEQ ID NO: 3872 - protein, 17 aa, Artificial Sequence
  Synthetic Peptide
PPPCPRCPEPKSCDTPP

SEQ ID NO: 3873 - protein, 17 aa, Artificial Sequence
  Synthetic Peptide
PPCPRCPEPKSCDTPPP

SEQ ID NO: 3874 - protein, 17 aa, Artificial Sequence
  Synthetic Peptide
PCPRCPEPKSCDTPPPC

SEQ ID NO: 3875 - protein, 17 aa, Artificial Sequence
  Synthetic Peptide
CPRCPEPKSCDTPPPCP

SEQ ID NO: 3876 - protein, 17 aa, Artificial Sequence
  Synthetic Peptide
PRCPEPKSCDTPPPCPR

SEQ ID NO: 3877 - protein, 17 aa, Artificial Sequence
  Synthetic Peptide
RCPEPKSCDTPPPCPRC

SEQ ID NO: 3878 - protein, 17 aa, Artificial Sequence
  Synthetic Peptide
CPEPKSCDTPPPCPRCP

SEQ ID NO: 3879 - protein, 17 aa, Artificial Sequence
  Synthetic Peptide
PEPKSCDTPPPCPRCPE

SEQ ID NO: 3880 - protein, 17 aa, Artificial Sequence
  Synthetic Peptide
EPKSCDTPPPCPRCPEP

SEQ ID NO: 3881 - protein, 17 aa, Artificial Sequence
  Synthetic Peptide
PKSCDTPPPCPRCPEPK

SEQ ID NO: 3882 - protein, 17 aa, Artificial Sequence
  Synthetic Peptide
KSCDTPPPCPRCPEPKS

SEQ ID NO: 3883 - protein, 17 aa, Artificial Sequence
  Synthetic Peptide
SCDTPPPCPRCPEPKSC

SEQ ID NO: 3884 - protein, 17 aa, Artificial Sequence
  Synthetic Peptide
CDTPPPCPRCPEPKSCD

SEQ ID NO: 3885 - protein, 17 aa, Artificial Sequence
  Synthetic Peptide
DTPPPCPRCPEPKSCDT

SEQ ID NO: 3886 - protein, 17 aa, Artificial Sequence
  Synthetic Peptide
TPPPCPRCPEPKSCDTP

SEQ ID NO: 3887 - protein, 17 aa, Artificial Sequence
  Synthetic Peptide
PPPCPRCPEPKSCDTPP

SEQ ID NO: 3888 - protein, 17 aa, Artificial Sequence
  Synthetic Peptide
PPCPRCPEPKSCDTPPP

SEQ ID NO: 3889 - protein, 17 aa, Artificial Sequence
  Synthetic Peptide
PCPRCPEPKSCDTPPPC

SEQ ID NO: 3890 - protein, 17 aa, Artificial Sequence
  Synthetic Peptide
CPRCPEPKSCDTPPPCP

SEQ ID NO: 3891 - protein, 17 aa, Artificial Sequence
  Synthetic Peptide
PRCPEPKSCDTPPPCPR

SEQ ID NO: 3892 - protein, 17 aa, Artificial Sequence
  Synthetic Peptide
RCPEPKSCDTPPPCPRC

SEQ ID NO: 3893 - protein, 17 aa, Artificial Sequence
  Synthetic Peptide
CPEPKSCDTPPPCPRCP

SEQ ID NO: 3894 - protein, 16 aa, Artificial Sequence
  Synthetic Peptide
ELKTPLGDTTHTCPRC

SEQ ID NO: 3895 - protein, 16 aa, Artificial Sequence
  Synthetic Peptide
LKTPLGDTTHTCPRCP

SEQ ID NO: 3896 - protein, 16 aa, Artificial Sequence
  Synthetic Peptide
KTPLGDTTHTCPRCPE

SEQ ID NO: 3897 - protein, 16 aa, Artificial Sequence
  Synthetic Peptide
TPLGDTTHTCPRCPEP

SEQ ID NO: 3898 - protein, 16 aa, Artificial Sequence
  Synthetic Peptide
PLGDTTHTCPRCPEPK

SEQ ID NO: 3899 - protein, 16 aa, Artificial Sequence
  Synthetic Peptide
LGDTTHTCPRCPEPKS

SEQ ID NO: 3900 - protein, 16 aa, Artificial Sequence
  Synthetic Peptide
GDTTHTCPRCPEPKSC

SEQ ID NO: 3901 - protein, 16 aa, Artificial Sequence
  Synthetic Peptide
DTTHTCPRCPEPKSCD

SEQ ID NO: 3902 - protein, 16 aa, Artificial Sequence
  Synthetic Peptide
TTHTCPRCPEPKSCDT

SEQ ID NO: 3903 - protein, 16 aa, Artificial Sequence
  Synthetic Peptide
THTCPRCPEPKSCDTP

SEQ ID NO: 3904 - protein, 16 aa, Artificial Sequence
  Synthetic Peptide
HTCPRCPEPKSCDTPP

SEQ ID NO: 3905 - protein, 16 aa, Artificial Sequence
  Synthetic Peptide
TCPRCPEPKSCDTPPP

SEQ ID NO: 3906 - protein, 16 aa, Artificial Sequence
  Synthetic Peptide
CPRCPEPKSCDTPPPC

SEQ ID NO: 3907 - protein, 16 aa, Artificial Sequence
  Synthetic Peptide
PRCPEPKSCDTPPPCP

SEQ ID NO: 3908 - protein, 16 aa, Artificial Sequence
  Synthetic Peptide
RCPEPKSCDTPPPCPR

SEQ ID NO: 3909 - protein, 16 aa, Artificial Sequence
  Synthetic Peptide
CPEPKSCDTPPPCPRC

SEQ ID NO: 3910 - protein, 16 aa, Artificial Sequence
  Synthetic Peptide
PEPKSCDTPPPCPRCP

SEQ ID NO: 3911 - protein, 16 aa, Artificial Sequence
  Synthetic Peptide
EPKSCDTPPPCPRCPE

SEQ ID NO: 3912 - protein, 16 aa, Artificial Sequence
  Synthetic Peptide
PKSCDTPPPCPRCPEP

SEQ ID NO: 3913 - protein, 16 aa, Artificial Sequence
  Synthetic Peptide
KSCDTPPPCPRCPEPK

SEQ ID NO: 3914 - protein, 16 aa, Artificial Sequence
  Synthetic Peptide
SCDTPPPCPRCPEPKS

SEQ ID NO: 3915 - protein, 16 aa, Artificial Sequence
  Synthetic Peptide
CDTPPPCPRCPEPKSC

SEQ ID NO: 3916 - protein, 16 aa, Artificial Sequence
  Synthetic Peptide
DTPPPCPRCPEPKSCD

SEQ ID NO: 3917 - protein, 16 aa, Artificial Sequence
  Synthetic Peptide
TPPPCPRCPEPKSCDT

SEQ ID NO: 3918 - protein, 16 aa, Artificial Sequence
  Synthetic Peptide
PPPCPRCPEPKSCDTP

SEQ ID NO: 3919 - protein, 16 aa, Artificial Sequence
  Synthetic Peptide
PPCPRCPEPKSCDTPP

SEQ ID NO: 3920 - protein, 16 aa, Artificial Sequence
  Synthetic Peptide
PCPRCPEPKSCDTPPP

SEQ ID NO: 3921 - protein, 16 aa, Artificial Sequence
  Synthetic Peptide
CPRCPEPKSCDTPPPC

SEQ ID NO: 3922 - protein, 16 aa, Artificial Sequence
  Synthetic Peptide
PRCPEPKSCDTPPPCP

SEQ ID NO: 3923 - protein, 16 aa, Artificial Sequence
  Synthetic Peptide
RCPEPKSCDTPPPCPR

SEQ ID NO: 3924 - protein, 16 aa, Artificial Sequence
  Synthetic Peptide
CPEPKSCDTPPPCPRC

SEQ ID NO: 3925 - protein, 16 aa, Artificial Sequence
  Synthetic Peptide
PEPKSCDTPPPCPRCP

SEQ ID NO: 3926 - protein, 16 aa, Artificial Sequence
  Synthetic Peptide
EPKSCDTPPPCPRCPE

SEQ ID NO: 3927 - protein, 16 aa, Artificial Sequence
  Synthetic Peptide
PKSCDTPPPCPRCPEP

SEQ ID NO: 3928 - protein, 16 aa, Artificial Sequence
  Synthetic Peptide
KSCDTPPPCPRCPEPK

SEQ ID NO: 3929 - protein, 16 aa, Artificial Sequence
  Synthetic Peptide
SCDTPPPCPRCPEPKS

SEQ ID NO: 3930 - protein, 16 aa, Artificial Sequence
  Synthetic Peptide
CDTPPPCPRCPEPKSC

SEQ ID NO: 3931 - protein, 16 aa, Artificial Sequence
  Synthetic Peptide
DTPPPCPRCPEPKSCD

SEQ ID NO: 3932 - protein, 16 aa, Artificial Sequence
  Synthetic Peptide
TPPPCPRCPEPKSCDT

SEQ ID NO: 3933 - protein, 16 aa, Artificial Sequence
  Synthetic Peptide
PPPCPRCPEPKSCDTP

SEQ ID NO: 3934 - protein, 16 aa, Artificial Sequence
  Synthetic Peptide
PPCPRCPEPKSCDTPP

SEQ ID NO: 3935 - protein, 16 aa, Artificial Sequence
  Synthetic Peptide
PCPRCPEPKSCDTPPP

SEQ ID NO: 3936 - protein, 16 aa, Artificial Sequence
  Synthetic Peptide
CPRCPEPKSCDTPPPC

SEQ ID NO: 3937 - protein, 16 aa, Artificial Sequence
  Synthetic Peptide
PRCPEPKSCDTPPPCP

SEQ ID NO: 3938 - protein, 16 aa, Artificial Sequence
  Synthetic Peptide
RCPEPKSCDTPPPCPR

SEQ ID NO: 3939 - protein, 16 aa, Artificial Sequence
  Synthetic Peptide
CPEPKSCDTPPPCPRC

SEQ ID NO: 3940 - protein, 16 aa, Artificial Sequence
  Synthetic Peptide
PEPKSCDTPPPCPRCP

SEQ ID NO: 3941 - protein, 15 aa, Artificial Sequence
  Synthetic Peptide
ELKTPLGDTTHTCPR

SEQ ID NO: 3942 - protein, 15 aa, Artificial Sequence
  Synthetic Peptide
LKTPLGDTTHTCPRC

SEQ ID NO: 3943 - protein, 15 aa, Artificial Sequence
  Synthetic Peptide
KTPLGDTTHTCPRCP

SEQ ID NO: 3944 - protein, 15 aa, Artificial Sequence
  Synthetic Peptide
TPLGDTTHTCPRCPE

SEQ ID NO: 3945 - protein, 15 aa, Artificial Sequence
  Synthetic Peptide
PLGDTTHTCPRCPEP

SEQ ID NO: 3946 - protein, 15 aa, Artificial Sequence
  Synthetic Peptide
LGDTTHTCPRCPEPK

SEQ ID NO: 3947 - protein, 15 aa, Artificial Sequence
  Synthetic Peptide
GDTTHTCPRCPEPKS

SEQ ID NO: 3948 - protein, 15 aa, Artificial Sequence
  Synthetic Peptide
DTTHTCPRCPEPKSC

SEQ ID NO: 3949 - protein, 15 aa, Artificial Sequence
  Synthetic Peptide
TTHTCPRCPEPKSCD

SEQ ID NO: 3950 - protein, 15 aa, Artificial Sequence
  Synthetic Peptide
THTCPRCPEPKSCDT

SEQ ID NO: 3951 - protein, 15 aa, Artificial Sequence
  Synthetic Peptide
HTCPRCPEPKSCDTP

SEQ ID NO: 3952 - protein, 15 aa, Artificial Sequence
  Synthetic Peptide
TCPRCPEPKSCDTPP

SEQ ID NO: 3953 - protein, 15 aa, Artificial Sequence
  Synthetic Peptide
CPRCPEPKSCDTPPP

SEQ ID NO: 3954 - protein, 15 aa, Artificial Sequence
  Synthetic Peptide
PRCPEPKSCDTPPPC

SEQ ID NO: 3955 - protein, 15 aa, Artificial Sequence
  Synthetic Peptide
RCPEPKSCDTPPPCP

SEQ ID NO: 3956 - protein, 15 aa, Artificial Sequence
  Synthetic Peptide
CPEPKSCDTPPPCPR

SEQ ID NO: 3957 - protein, 15 aa, Artificial Sequence
  Synthetic Peptide
PEPKSCDTPPPCPRC

SEQ ID NO: 3958 - protein, 15 aa, Artificial Sequence
  Synthetic Peptide
EPKSCDTPPPCPRCP

SEQ ID NO: 3959 - protein, 15 aa, Artificial Sequence
  Synthetic Peptide
PKSCDTPPPCPRCPE

SEQ ID NO: 3960 - protein, 15 aa, Artificial Sequence
  Synthetic Peptide
KSCDTPPPCPRCPEP

SEQ ID NO: 3961 - protein, 15 aa, Artificial Sequence
  Synthetic Peptide
SCDTPPPCPRCPEPK

SEQ ID NO: 3962 - protein, 15 aa, Artificial Sequence
  Synthetic Peptide
CDTPPPCPRCPEPKS

SEQ ID NO: 3963 - protein, 15 aa, Artificial Sequence
  Synthetic Peptide
DTPPPCPRCPEPKSC

SEQ ID NO: 3964 - protein, 15 aa, Artificial Sequence
  Synthetic Peptide
TPPPCPRCPEPKSCD

SEQ ID NO: 3965 - protein, 15 aa, Artificial Sequence
  Synthetic Peptide
PPPCPRCPEPKSCDT

SEQ ID NO: 3966 - protein, 15 aa, Artificial Sequence
  Synthetic Peptide
PPCPRCPEPKSCDTP

SEQ ID NO: 3967 - protein, 15 aa, Artificial Sequence
  Synthetic Peptide
PCPRCPEPKSCDTPP

SEQ ID NO: 3968 - protein, 15 aa, Artificial Sequence
  Synthetic Peptide
CPRCPEPKSCDTPPP

SEQ ID NO: 3969 - protein, 15 aa, Artificial Sequence
  Synthetic Peptide
PRCPEPKSCDTPPPC

SEQ ID NO: 3970 - protein, 15 aa, Artificial Sequence
  Synthetic Peptide
RCPEPKSCDTPPPCP

SEQ ID NO: 3971 - protein, 15 aa, Artificial Sequence
  Synthetic Peptide
CPEPKSCDTPPPCPR

SEQ ID NO: 3972 - protein, 15 aa, Artificial Sequence
  Synthetic Peptide
PEPKSCDTPPPCPRC

SEQ ID NO: 3973 - protein, 15 aa, Artificial Sequence
  Synthetic Peptide
EPKSCDTPPPCPRCP

SEQ ID NO: 3974 - protein, 15 aa, Artificial Sequence
  Synthetic Peptide
PKSCDTPPPCPRCPE

SEQ ID NO: 3975 - protein, 15 aa, Artificial Sequence
  Synthetic Peptide
KSCDTPPPCPRCPEP

SEQ ID NO: 3976 - protein, 15 aa, Artificial Sequence
  Synthetic Peptide
SCDTPPPCPRCPEPK

SEQ ID NO: 3977 - protein, 15 aa, Artificial Sequence
  Synthetic Peptide
CDTPPPCPRCPEPKS

SEQ ID NO: 3978 - protein, 15 aa, Artificial Sequence
  Synthetic Peptide
DTPPPCPRCPEPKSC

SEQ ID NO: 3979 - protein, 15 aa, Artificial Sequence
  Synthetic Peptide
TPPPCPRCPEPKSCD

SEQ ID NO: 3980 - protein, 15 aa, Artificial Sequence
  Synthetic Peptide
PPPCPRCPEPKSCDT

SEQ ID NO: 3981 - protein, 15 aa, Artificial Sequence
  Synthetic Peptide
PPCPRCPEPKSCDTP

SEQ ID NO: 3982 - protein, 15 aa, Artificial Sequence
  Synthetic Peptide
PCPRCPEPKSCDTPP

SEQ ID NO: 3983 - protein, 15 aa, Artificial Sequence
  Synthetic Peptide
CPRCPEPKSCDTPPP

SEQ ID NO: 3984 - protein, 15 aa, Artificial Sequence
  Synthetic Peptide
PRCPEPKSCDTPPPC

SEQ ID NO: 3985 - protein, 15 aa, Artificial Sequence
  Synthetic Peptide
RCPEPKSCDTPPPCP

SEQ ID NO: 3986 - protein, 15 aa, Artificial Sequence
  Synthetic Peptide
CPEPKSCDTPPPCPR

SEQ ID NO: 3987 - protein, 15 aa, Artificial Sequence
  Synthetic Peptide
PEPKSCDTPPPCPRC

SEQ ID NO: 3988 - protein, 15 aa, Artificial Sequence
  Synthetic Peptide
EPKSCDTPPPCPRCP

SEQ ID NO: 3989 - protein, 14 aa, Artificial Sequence
  Synthetic Peptide
ELKTPLGDTTHTCP

SEQ ID NO: 3990 - protein, 14 aa, Artificial Sequence
  Synthetic Peptide
LKTPLGDTTHTCPR

SEQ ID NO: 3991 - protein, 14 aa, Artificial Sequence
  Synthetic Peptide
KTPLGDTTHTCPRC

SEQ ID NO: 3992 - protein, 14 aa, Artificial Sequence
  Synthetic Peptide
TPLGDTTHTCPRCP

SEQ ID NO: 3993 - protein, 14 aa, Artificial Sequence
  Synthetic Peptide
PLGDTTHTCPRCPE

SEQ ID NO: 3994 - protein, 14 aa, Artificial Sequence
  Synthetic Peptide
LGDTTHTCPRCPEP

SEQ ID NO: 3995 - protein, 14 aa, Artificial Sequence
  Synthetic Peptide
GDTTHTCPRCPEPK

SEQ ID NO: 3996 - protein, 14 aa, Artificial Sequence
  Synthetic Peptide
DTTHTCPRCPEPKS

SEQ ID NO: 3997 - protein, 14 aa, Artificial Sequence
  Synthetic Peptide
TTHTCPRCPEPKSC

SEQ ID NO: 3998 - protein, 14 aa, Artificial Sequence
  Synthetic Peptide
THTCPRCPEPKSCD

SEQ ID NO: 3999 - protein, 14 aa, Artificial Sequence
  Synthetic Peptide
HTCPRCPEPKSCDT

SEQ ID NO: 4000 - protein, 14 aa, Artificial Sequence
  Synthetic Peptide
TCPRCPEPKSCDTP

SEQ ID NO: 4001 - protein, 14 aa, Artificial Sequence
  Synthetic Peptide
CPRCPEPKSCDTPP

SEQ ID NO: 4002 - protein, 14 aa, Artificial Sequence
  Synthetic Peptide
PRCPEPKSCDTPPP

SEQ ID NO: 4003 - protein, 14 aa, Artificial Sequence
  Synthetic Peptide
RCPEPKSCDTPPPC

SEQ ID NO: 4004 - protein, 14 aa, Artificial Sequence
  Synthetic Peptide
CPEPKSCDTPPPCP

SEQ ID NO: 4005 - protein, 14 aa, Artificial Sequence
  Synthetic Peptide
PEPKSCDTPPPCPR

SEQ ID NO: 4006 - protein, 14 aa, Artificial Sequence
  Synthetic Peptide
EPKSCDTPPPCPRC

SEQ ID NO: 4007 - protein, 14 aa, Artificial Sequence
  Synthetic Peptide
PKSCDTPPPCPRCP

SEQ ID NO: 4008 - protein, 14 aa, Artificial Sequence
  Synthetic Peptide
KSCDTPPPCPRCPE

SEQ ID NO: 4009 - protein, 14 aa, Artificial Sequence
  Synthetic Peptide
SCDTPPPCPRCPEP

SEQ ID NO: 4010 - protein, 14 aa, Artificial Sequence
  Synthetic Peptide
CDTPPPCPRCPEPK

SEQ ID NO: 4011 - protein, 14 aa, Artificial Sequence
  Synthetic Peptide
DTPPPCPRCPEPKS

SEQ ID NO: 4012 - protein, 14 aa, Artificial Sequence
  Synthetic Peptide
TPPPCPRCPEPKSC

SEQ ID NO: 4013 - protein, 14 aa, Artificial Sequence
  Synthetic Peptide
PPPCPRCPEPKSCD

SEQ ID NO: 4014 - protein, 14 aa, Artificial Sequence
  Synthetic Peptide
PPCPRCPEPKSCDT

SEQ ID NO: 4015 - protein, 14 aa, Artificial Sequence
  Synthetic Peptide
PCPRCPEPKSCDTP

SEQ ID NO: 4016 - protein, 14 aa, Artificial Sequence
  Synthetic Peptide
CPRCPEPKSCDTPP

SEQ ID NO: 4017 - protein, 14 aa, Artificial Sequence
  Synthetic Peptide
PRCPEPKSCDTPPP

SEQ ID NO: 4018 - protein, 14 aa, Artificial Sequence
  Synthetic Peptide
RCPEPKSCDTPPPC

SEQ ID NO: 4019 - protein, 14 aa, Artificial Sequence
  Synthetic Peptide
CPEPKSCDTPPPCP

SEQ ID NO: 4020 - protein, 14 aa, Artificial Sequence
  Synthetic Peptide
PEPKSCDTPPPCPR

SEQ ID NO: 4021 - protein, 14 aa, Artificial Sequence
  Synthetic Peptide
EPKSCDTPPPCPRC

SEQ ID NO: 4022 - protein, 14 aa, Artificial Sequence
  Synthetic Peptide
PKSCDTPPPCPRCP

SEQ ID NO: 4023 - protein, 14 aa, Artificial Sequence
  Synthetic Peptide
KSCDTPPPCPRCPE

SEQ ID NO: 4024 - protein, 14 aa, Artificial Sequence
  Synthetic Peptide
SCDTPPPCPRCPEP

SEQ ID NO: 4025 - protein, 14 aa, Artificial Sequence
  Synthetic Peptide
CDTPPPCPRCPEPK

SEQ ID NO: 4026 - protein, 14 aa, Artificial Sequence
  Synthetic Peptide
DTPPPCPRCPEPKS

SEQ ID NO: 4027 - protein, 14 aa, Artificial Sequence
  Synthetic Peptide
TPPPCPRCPEPKSC

SEQ ID NO: 4028 - protein, 14 aa, Artificial Sequence
  Synthetic Peptide
PPPCPRCPEPKSCD

SEQ ID NO: 4029 - protein, 14 aa, Artificial Sequence
  Synthetic Peptide
PPCPRCPEPKSCDT

SEQ ID NO: 4030 - protein, 14 aa, Artificial Sequence
  Synthetic Peptide
PCPRCPEPKSCDTP

SEQ ID NO: 4031 - protein, 14 aa, Artificial Sequence
  Synthetic Peptide
CPRCPEPKSCDTPP

SEQ ID NO: 4032 - protein, 14 aa, Artificial Sequence
  Synthetic Peptide
PRCPEPKSCDTPPP

SEQ ID NO: 4033 - protein, 14 aa, Artificial Sequence
  Synthetic Peptide
RCPEPKSCDTPPPC

SEQ ID NO: 4034 - protein, 14 aa, Artificial Sequence
  Synthetic Peptide
CPEPKSCDTPPPCP

SEQ ID NO: 4035 - protein, 14 aa, Artificial Sequence
  Synthetic Peptide
PEPKSCDTPPPCPR

SEQ ID NO: 4036 - protein, 14 aa, Artificial Sequence
  Synthetic Peptide
EPKSCDTPPPCPRC

SEQ ID NO: 4037 - protein, 14 aa, Artificial Sequence
  Synthetic Peptide
PKSCDTPPPCPRCP

SEQ ID NO: 4038 - protein, 13 aa, Artificial Sequence
  Synthetic Peptide
ELKTPLGDTTHTC

SEQ ID NO: 4039 - protein, 13 aa, Artificial Sequence
  Synthetic Peptide
LKTPLGDTTHTCP

SEQ ID NO: 4040 - protein, 13 aa, Artificial Sequence
  Synthetic Peptide
KTPLGDTTHTCPR

SEQ ID NO: 4041 - protein, 13 aa, Artificial Sequence
  Synthetic Peptide
TPLGDTTHTCPRC

SEQ ID NO: 4042 - protein, 13 aa, Artificial Sequence
  Synthetic Peptide
PLGDTTHTCPRCP

SEQ ID NO: 4043 - protein, 13 aa, Artificial Sequence
  Synthetic Peptide
LGDTTHTCPRCPE

SEQ ID NO: 4044 - protein, 13 aa, Artificial Sequence
  Synthetic Peptide
GDTTHTCPRCPEP

SEQ ID NO: 4045 - protein, 13 aa, Artificial Sequence
  Synthetic Peptide
DTTHTCPRCPEPK

SEQ ID NO: 4046 - protein, 13 aa, Artificial Sequence
  Synthetic Peptide
TTHTCPRCPEPKS

SEQ ID NO: 4047 - protein, 13 aa, Artificial Sequence
  Synthetic Peptide
THTCPRCPEPKSC

SEQ ID NO: 4048 - protein, 13 aa, Artificial Sequence
  Synthetic Peptide
HTCPRCPEPKSCD

SEQ ID NO: 4049 - protein, 13 aa, Artificial Sequence
  Synthetic Peptide
TCPRCPEPKSCDT

SEQ ID NO: 4050 - protein, 13 aa, Artificial Sequence
  Synthetic Peptide
CPRCPEPKSCDTP

SEQ ID NO: 4051 - protein, 13 aa, Artificial Sequence
  Synthetic Peptide
PRCPEPKSCDTPP

SEQ ID NO: 4052 - protein, 13 aa, Artificial Sequence
  Synthetic Peptide
RCPEPKSCDTPPP

SEQ ID NO: 4053 - protein, 13 aa, Artificial Sequence
  Synthetic Peptide
CPEPKSCDTPPPC

SEQ ID NO: 4054 - protein, 13 aa, Artificial Sequence
  Synthetic Peptide
PEPKSCDTPPPCP

SEQ ID NO: 4055 - protein, 13 aa, Artificial Sequence
  Synthetic Peptide
EPKSCDTPPPCPR

SEQ ID NO: 4056 - protein, 13 aa, Artificial Sequence
  Synthetic Peptide
PKSCDTPPPCPRC

SEQ ID NO: 4057 - protein, 13 aa, Artificial Sequence
  Synthetic Peptide
KSCDTPPPCPRCP

SEQ ID NO: 4058 - protein, 13 aa, Artificial Sequence
  Synthetic Peptide
SCDTPPPCPRCPE

SEQ ID NO: 4059 - protein, 13 aa, Artificial Sequence
  Synthetic Peptide
CDTPPPCPRCPEP

SEQ ID NO: 4060 - protein, 13 aa, Artificial Sequence
  Synthetic Peptide
DTPPPCPRCPEPK

SEQ ID NO: 4061 - protein, 13 aa, Artificial Sequence
  Synthetic Peptide
TPPPCPRCPEPKS

SEQ ID NO: 4062 - protein, 13 aa, Artificial Sequence
  Synthetic Peptide
PPPCPRCPEPKSC

SEQ ID NO: 4063 - protein, 13 aa, Artificial Sequence
  Synthetic Peptide
PPCPRCPEPKSCD

SEQ ID NO: 4064 - protein, 13 aa, Artificial Sequence
  Synthetic Peptide
PCPRCPEPKSCDT

SEQ ID NO: 4065 - protein, 13 aa, Artificial Sequence
  Synthetic Peptide
CPRCPEPKSCDTP

SEQ ID NO: 4066 - protein, 13 aa, Artificial Sequence
  Synthetic Peptide
PRCPEPKSCDTPP

SEQ ID NO: 4067 - protein, 13 aa, Artificial Sequence
  Synthetic Peptide
RCPEPKSCDTPPP

SEQ ID NO: 4068 - protein, 13 aa, Artificial Sequence
  Synthetic Peptide
CPEPKSCDTPPPC

SEQ ID NO: 4069 - protein, 13 aa, Artificial Sequence
  Synthetic Peptide
PEPKSCDTPPPCP

SEQ ID NO: 4070 - protein, 13 aa, Artificial Sequence
  Synthetic Peptide
EPKSCDTPPPCPR

SEQ ID NO: 4071 - protein, 13 aa, Artificial Sequence
  Synthetic Peptide
PKSCDTPPPCPRC

SEQ ID NO: 4072 - protein, 13 aa, Artificial Sequence
  Synthetic Peptide
KSCDTPPPCPRCP

SEQ ID NO: 4073 - protein, 13 aa, Artificial Sequence
  Synthetic Peptide
SCDTPPPCPRCPE

SEQ ID NO: 4074 - protein, 13 aa, Artificial Sequence
  Synthetic Peptide
CDTPPPCPRCPEP

SEQ ID NO: 4075 - protein, 13 aa, Artificial Sequence
  Synthetic Peptide
DTPPPCPRCPEPK

SEQ ID NO: 4076 - protein, 13 aa, Artificial Sequence
  Synthetic Peptide
TPPPCPRCPEPKS

SEQ ID NO: 4077 - protein, 13 aa, Artificial Sequence
  Synthetic Peptide
PPPCPRCPEPKSC

SEQ ID NO: 4078 - protein, 13 aa, Artificial Sequence
  Synthetic Peptide
PPCPRCPEPKSCD

SEQ ID NO: 4079 - protein, 13 aa, Artificial Sequence
  Synthetic Peptide
PCPRCPEPKSCDT

SEQ ID NO: 4080 - protein, 13 aa, Artificial Sequence
  Synthetic Peptide
CPRCPEPKSCDTP

SEQ ID NO: 4081 - protein, 13 aa, Artificial Sequence
  Synthetic Peptide
PRCPEPKSCDTPP

SEQ ID NO: 4082 - protein, 13 aa, Artificial Sequence
  Synthetic Peptide
RCPEPKSCDTPPP

SEQ ID NO: 4083 - protein, 13 aa, Artificial Sequence
  Synthetic Peptide
CPEPKSCDTPPPC

SEQ ID NO: 4084 - protein, 13 aa, Artificial Sequence
  Synthetic Peptide
PEPKSCDTPPPCP

SEQ ID NO: 4085 - protein, 13 aa, Artificial Sequence
  Synthetic Peptide
EPKSCDTPPPCPR

SEQ ID NO: 4086 - protein, 13 aa, Artificial Sequence
  Synthetic Peptide
PKSCDTPPPCPRC

SEQ ID NO: 4087 - protein, 13 aa, Artificial Sequence
  Synthetic Peptide
KSCDTPPPCPRCP

SEQ ID NO: 4088 - protein, 12 aa, Artificial Sequence
  Synthetic Peptide
ELKTPLGDTTHT

SEQ ID NO: 4089 - protein, 12 aa, Artificial Sequence
  Synthetic Peptide
LKTPLGDTTHTC

SEQ ID NO: 4090 - protein, 12 aa, Artificial Sequence
  Synthetic Peptide
KTPLGDTTHTCP

SEQ ID NO: 4091 - protein, 12 aa, Artificial Sequence
  Synthetic Peptide
TPLGDTTHTCPR

SEQ ID NO: 4092 - protein, 12 aa, Artificial Sequence
  Synthetic Peptide
PLGDTTHTCPRC

SEQ ID NO: 4093 - protein, 12 aa, Artificial Sequence
  Synthetic Peptide
LGDTTHTCPRCP

SEQ ID NO: 4094 - protein, 12 aa, Artificial Sequence
  Synthetic Peptide
GDTTHTCPRCPE

SEQ ID NO: 4095 - protein, 12 aa, Artificial Sequence
  Synthetic Peptide
DTTHTCPRCPEP

SEQ ID NO: 4096 - protein, 12 aa, Artificial Sequence
  Synthetic Peptide
TTHTCPRCPEPK

SEQ ID NO: 4097 - protein, 12 aa, Artificial Sequence
  Synthetic Peptide
THTCPRCPEPKS

SEQ ID NO: 4098 - protein, 12 aa, Artificial Sequence
  Synthetic Peptide
HTCPRCPEPKSC

SEQ ID NO: 4099 - protein, 12 aa, Artificial Sequence
  Synthetic Peptide
TCPRCPEPKSCD

SEQ ID NO: 4100 - protein, 12 aa, Artificial Sequence
  Synthetic Peptide
CPRCPEPKSCDT

SEQ ID NO: 4101 - protein, 12 aa, Artificial Sequence
  Synthetic Peptide
PRCPEPKSCDTP

SEQ ID NO: 4102 - protein, 12 aa, Artificial Sequence
  Synthetic Peptide
RCPEPKSCDTPP

SEQ ID NO: 4103 - protein, 12 aa, Artificial Sequence
  Synthetic Peptide
CPEPKSCDTPPP

SEQ ID NO: 4104 - protein, 12 aa, Artificial Sequence
  Synthetic Peptide
PEPKSCDTPPPC

SEQ ID NO: 4105 - protein, 12 aa, Artificial Sequence
  Synthetic Peptide
EPKSCDTPPPCP

SEQ ID NO: 4106 - protein, 12 aa, Artificial Sequence
  Synthetic Peptide
PKSCDTPPPCPR

SEQ ID NO: 4107 - protein, 12 aa, Artificial Sequence
  Synthetic Peptide
KSCDTPPPCPRC

SEQ ID NO: 4108 - protein, 12 aa, Artificial Sequence
  Synthetic Peptide
SCDTPPPCPRCP

SEQ ID NO: 4109 - protein, 12 aa, Artificial Sequence
  Synthetic Peptide
CDTPPPCPRCPE

SEQ ID NO: 4110 - protein, 12 aa, Artificial Sequence
  Synthetic Peptide
DTPPPCPRCPEP

SEQ ID NO: 4111 - protein, 12 aa, Artificial Sequence
  Synthetic Peptide
TPPPCPRCPEPK

SEQ ID NO: 4112 - protein, 12 aa, Artificial Sequence
  Synthetic Peptide
PPPCPRCPEPKS

SEQ ID NO: 4113 - protein, 12 aa, Artificial Sequence
  Synthetic Peptide
PPCPRCPEPKSC

SEQ ID NO: 4114 - protein, 12 aa, Artificial Sequence
  Synthetic Peptide
PCPRCPEPKSCD

SEQ ID NO: 4115 - protein, 12 aa, Artificial Sequence
  Synthetic Peptide
CPRCPEPKSCDT

SEQ ID NO: 4116 - protein, 12 aa, Artificial Sequence
  Synthetic Peptide
PRCPEPKSCDTP

SEQ ID NO: 4117 - protein, 12 aa, Artificial Sequence
  Synthetic Peptide
RCPEPKSCDTPP

SEQ ID NO: 4118 - protein, 12 aa, Artificial Sequence
  Synthetic Peptide
CPEPKSCDTPPP

SEQ ID NO: 4119 - protein, 12 aa, Artificial Sequence
  Synthetic Peptide
PEPKSCDTPPPC

SEQ ID NO: 4120 - protein, 12 aa, Artificial Sequence
  Synthetic Peptide
EPKSCDTPPPCP

SEQ ID NO: 4121 - protein, 12 aa, Artificial Sequence
  Synthetic Peptide
PKSCDTPPPCPR

SEQ ID NO: 4122 - protein, 12 aa, Artificial Sequence
  Synthetic Peptide
KSCDTPPPCPRC

SEQ ID NO: 4123 - protein, 12 aa, Artificial Sequence
  Synthetic Peptide
SCDTPPPCPRCP

SEQ ID NO: 4124 - protein, 12 aa, Artificial Sequence
  Synthetic Peptide
CDTPPPCPRCPE

SEQ ID NO: 4125 - protein, 12 aa, Artificial Sequence
  Synthetic Peptide
DTPPPCPRCPEP

SEQ ID NO: 4126 - protein, 12 aa, Artificial Sequence
  Synthetic Peptide
TPPPCPRCPEPK

SEQ ID NO: 4127 - protein, 12 aa, Artificial Sequence
  Synthetic Peptide
PPPCPRCPEPKS

SEQ ID NO: 4128 - protein, 12 aa, Artificial Sequence
  Synthetic Peptide
PPCPRCPEPKSC

SEQ ID NO: 4129 - protein, 12 aa, Artificial Sequence
  Synthetic Peptide
PCPRCPEPKSCD

SEQ ID NO: 4130 - protein, 12 aa, Artificial Sequence
  Synthetic Peptide
CPRCPEPKSCDT

SEQ ID NO: 4131 - protein, 12 aa, Artificial Sequence
  Synthetic Peptide
PRCPEPKSCDTP

SEQ ID NO: 4132 - protein, 12 aa, Artificial Sequence
  Synthetic Peptide
RCPEPKSCDTPP

SEQ ID NO: 4133 - protein, 12 aa, Artificial Sequence
  Synthetic Peptide
CPEPKSCDTPPP

SEQ ID NO: 4134 - protein, 12 aa, Artificial Sequence
  Synthetic Peptide
PEPKSCDTPPPC

SEQ ID NO: 4135 - protein, 12 aa, Artificial Sequence
  Synthetic Peptide
EPKSCDTPPPCP

SEQ ID NO: 4136 - protein, 12 aa, Artificial Sequence
  Synthetic Peptide
PKSCDTPPPCPR

SEQ ID NO: 4137 - protein, 12 aa, Artificial Sequence
  Synthetic Peptide
KSCDTPPPCPRC

SEQ ID NO: 4138 - protein, 12 aa, Artificial Sequence
  Synthetic Peptide
SCDTPPPCPRCP

SEQ ID NO: 4139 - protein, 11 aa, Artificial Sequence
  Synthetic Peptide
ELKTPLGDTTH

SEQ ID NO: 4140 - protein, 11 aa, Artificial Sequence
  Synthetic Peptide
LKTPLGDTTHT

SEQ ID NO: 4141 - protein, 11 aa, Artificial Sequence
  Synthetic Peptide
KTPLGDTTHTC

SEQ ID NO: 4142 - protein, 11 aa, Artificial Sequence
  Synthetic Peptide
TPLGDTTHTCP

SEQ ID NO: 4143 - protein, 11 aa, Artificial Sequence
  Synthetic Peptide
PLGDTTHTCPR

SEQ ID NO: 4144 - protein, 11 aa, Artificial Sequence
  Synthetic Peptide
LGDTTHTCPRC

SEQ ID NO: 4145 - protein, 11 aa, Artificial Sequence
  Synthetic Peptide
GDTTHTCPRCP

SEQ ID NO: 4146 - protein, 11 aa, Artificial Sequence
  Synthetic Peptide
DTTHTCPRCPE

SEQ ID NO: 4147 - protein, 11 aa, Artificial Sequence
  Synthetic Peptide
TTHTCPRCPEP

SEQ ID NO: 4148 - protein, 11 aa, Artificial Sequence
  Synthetic Peptide
THTCPRCPEPK

SEQ ID NO: 4149 - protein, 11 aa, Artificial Sequence
  Synthetic Peptide
HTCPRCPEPKS

SEQ ID NO: 4150 - protein, 11 aa, Artificial Sequence
  Synthetic Peptide
TCPRCPEPKSC

SEQ ID NO: 4151 - protein, 11 aa, Artificial Sequence
  Synthetic Peptide
CPRCPEPKSCD

SEQ ID NO: 4152 - protein, 11 aa, Artificial Sequence
  Synthetic Peptide
PRCPEPKSCDT

SEQ ID NO: 4153 - protein, 11 aa, Artificial Sequence
  Synthetic Peptide
RCPEPKSCDTP

SEQ ID NO: 4154 - protein, 11 aa, Artificial Sequence
  Synthetic Peptide
CPEPKSCDTPP

SEQ ID NO: 4155 - protein, 11 aa, Artificial Sequence
  Synthetic Peptide
PEPKSCDTPPP

SEQ ID NO: 4156 - protein, 11 aa, Artificial Sequence
  Synthetic Peptide
EPKSCDTPPPC

SEQ ID NO: 4157 - protein, 11 aa, Artificial Sequence
  Synthetic Peptide
PKSCDTPPPCP

SEQ ID NO: 4158 - protein, 11 aa, Artificial Sequence
  Synthetic Peptide
KSCDTPPPCPR

SEQ ID NO: 4159 - protein, 11 aa, Artificial Sequence
  Synthetic Peptide
SCDTPPPCPRC

SEQ ID NO: 4160 - protein, 11 aa, Artificial Sequence
  Synthetic Peptide
CDTPPPCPRCP

SEQ ID NO: 4161 - protein, 11 aa, Artificial Sequence
  Synthetic Peptide
DTPPPCPRCPE

SEQ ID NO: 4162 - protein, 11 aa, Artificial Sequence
  Synthetic Peptide
TPPPCPRCPEP

SEQ ID NO: 4163 - protein, 11 aa, Artificial Sequence
  Synthetic Peptide
PPPCPRCPEPK

SEQ ID NO: 4164 - protein, 11 aa, Artificial Sequence
  Synthetic Peptide
PPCPRCPEPKS

SEQ ID NO: 4165 - protein, 11 aa, Artificial Sequence
  Synthetic Peptide
PCPRCPEPKSC

SEQ ID NO: 4166 - protein, 11 aa, Artificial Sequence
  Synthetic Peptide
CPRCPEPKSCD

SEQ ID NO: 4167 - protein, 11 aa, Artificial Sequence
  Synthetic Peptide
PRCPEPKSCDT

SEQ ID NO: 4168 - protein, 11 aa, Artificial Sequence
  Synthetic Peptide
RCPEPKSCDTP

SEQ ID NO: 4169 - protein, 11 aa, Artificial Sequence
  Synthetic Peptide
CPEPKSCDTPP

SEQ ID NO: 4170 - protein, 11 aa, Artificial Sequence
  Synthetic Peptide
PEPKSCDTPPP

SEQ ID NO: 4171 - protein, 11 aa, Artificial Sequence
  Synthetic Peptide
EPKSCDTPPPC

SEQ ID NO: 4172 - protein, 11 aa, Artificial Sequence
  Synthetic Peptide
PKSCDTPPPCP

SEQ ID NO: 4173 - protein, 11 aa, Artificial Sequence
  Synthetic Peptide
KSCDTPPPCPR

SEQ ID NO: 4174 - protein, 11 aa, Artificial Sequence
  Synthetic Peptide
SCDTPPPCPRC

SEQ ID NO: 4175 - protein, 11 aa, Artificial Sequence
  Synthetic Peptide
CDTPPPCPRCP

SEQ ID NO: 4176 - protein, 11 aa, Artificial Sequence
  Synthetic Peptide
DTPPPCPRCPE

SEQ ID NO: 4177 - protein, 11 aa, Artificial Sequence
  Synthetic Peptide
TPPPCPRCPEP

SEQ ID NO: 4178 - protein, 11 aa, Artificial Sequence
  Synthetic Peptide
PPPCPRCPEPK

SEQ ID NO: 4179 - protein, 11 aa, Artificial Sequence
  Synthetic Peptide
PPCPRCPEPKS

SEQ ID NO: 4180 - protein, 11 aa, Artificial Sequence
  Synthetic Peptide
PCPRCPEPKSC

SEQ ID NO: 4181 - protein, 11 aa, Artificial Sequence
  Synthetic Peptide
CPRCPEPKSCD

SEQ ID NO: 4182 - protein, 11 aa, Artificial Sequence
  Synthetic Peptide
PRCPEPKSCDT

SEQ ID NO: 4183 - protein, 11 aa, Artificial Sequence
  Synthetic Peptide
RCPEPKSCDTP

SEQ ID NO: 4184 - protein, 11 aa, Artificial Sequence
  Synthetic Peptide
CPEPKSCDTPP

SEQ ID NO: 4185 - protein, 11 aa, Artificial Sequence
  Synthetic Peptide
PEPKSCDTPPP

SEQ ID NO: 4186 - protein, 11 aa, Artificial Sequence
  Synthetic Peptide
EPKSCDTPPPC

SEQ ID NO: 4187 - protein, 11 aa, Artificial Sequence
  Synthetic Peptide
PKSCDTPPPCP

SEQ ID NO: 4188 - protein, 11 aa, Artificial Sequence
  Synthetic Peptide
KSCDTPPPCPR

SEQ ID NO: 4189 - protein, 11 aa, Artificial Sequence
  Synthetic Peptide
SCDTPPPCPRC

SEQ ID NO: 4190 - protein, 11 aa, Artificial Sequence
  Synthetic Peptide
CDTPPPCPRCP

SEQ ID NO: 4191 - protein, 10 aa, Artificial Sequence
  Synthetic Peptide
ELKTPLGDTT

SEQ ID NO: 4192 - protein, 10 aa, Artificial Sequence
  Synthetic Peptide
LKTPLGDTTH

SEQ ID NO: 4193 - protein, 10 aa, Artificial Sequence
  Synthetic Peptide
KTPLGDTTHT

SEQ ID NO: 4194 - protein, 10 aa, Artificial Sequence
  Synthetic Peptide
TPLGDTTHTC

SEQ ID NO: 4195 - protein, 10 aa, Artificial Sequence
  Synthetic Peptide
PLGDTTHTCP

SEQ ID NO: 4196 - protein, 10 aa, Artificial Sequence
  Synthetic Peptide
LGDTTHTCPR

SEQ ID NO: 4197 - protein, 10 aa, Artificial Sequence
  Synthetic Peptide
GDTTHTCPRC

SEQ ID NO: 4198 - protein, 10 aa, Artificial Sequence
  Synthetic Peptide
DTTHTCPRCP

SEQ ID NO: 4199 - protein, 10 aa, Artificial Sequence
  Synthetic Peptide
TTHTCPRCPE

SEQ ID NO: 4200 - protein, 10 aa, Artificial Sequence
  Synthetic Peptide
THTCPRCPEP

SEQ ID NO: 4201 - protein, 10 aa, Artificial Sequence
  Synthetic Peptide
HTCPRCPEPK

SEQ ID NO: 4202 - protein, 10 aa, Artificial Sequence
  Synthetic Peptide
TCPRCPEPKS

SEQ ID NO: 4203 - protein, 10 aa, Artificial Sequence
  Synthetic Peptide
CPRCPEPKSC

SEQ ID NO: 4204 - protein, 10 aa, Artificial Sequence
  Synthetic Peptide
PRCPEPKSCD

SEQ ID NO: 4205 - protein, 10 aa, Artificial Sequence
  Synthetic Peptide
RCPEPKSCDT

SEQ ID NO: 4206 - protein, 10 aa, Artificial Sequence
  Synthetic Peptide
CPEPKSCDTP

SEQ ID NO: 4207 - protein, 10 aa, Artificial Sequence
  Synthetic Peptide
PEPKSCDTPP

SEQ ID NO: 4208 - protein, 10 aa, Artificial Sequence
  Synthetic Peptide
EPKSCDTPPP

SEQ ID NO: 4209 - protein, 10 aa, Artificial Sequence
  Synthetic Peptide
PKSCDTPPPC

SEQ ID NO: 4210 - protein, 10 aa, Artificial Sequence
  Synthetic Peptide
KSCDTPPPCP

SEQ ID NO: 4211 - protein, 10 aa, Artificial Sequence
  Synthetic Peptide
SCDTPPPCPR

SEQ ID NO: 4212 - protein, 10 aa, Artificial Sequence
  Synthetic Peptide
CDTPPPCPRC

SEQ ID NO: 4213 - protein, 10 aa, Artificial Sequence
  Synthetic Peptide
DTPPPCPRCP

SEQ ID NO: 4214 - protein, 10 aa, Artificial Sequence
  Synthetic Peptide
TPPPCPRCPE

SEQ ID NO: 4215 - protein, 10 aa, Artificial Sequence
  Synthetic Peptide
PPPCPRCPEP

SEQ ID NO: 4216 - protein, 10 aa, Artificial Sequence
  Synthetic Peptide
PPCPRCPEPK

SEQ ID NO: 4217 - protein, 10 aa, Artificial Sequence
  Synthetic Peptide
PCPRCPEPKS

SEQ ID NO: 4218 - protein, 10 aa, Artificial Sequence
  Synthetic Peptide
CPRCPEPKSC

SEQ ID NO: 4219 - protein, 10 aa, Artificial Sequence
  Synthetic Peptide
PRCPEPKSCD

SEQ ID NO: 4220 - protein, 10 aa, Artificial Sequence
  Synthetic Peptide
RCPEPKSCDT

SEQ ID NO: 4221 - protein, 10 aa, Artificial Sequence
  Synthetic Peptide
CPEPKSCDTP

SEQ ID NO: 4222 - protein, 10 aa, Artificial Sequence
  Synthetic Peptide
PEPKSCDTPP

SEQ ID NO: 4223 - protein, 10 aa, Artificial Sequence
  Synthetic Peptide
EPKSCDTPPP

SEQ ID NO: 4224 - protein, 10 aa, Artificial Sequence
  Synthetic Peptide
PKSCDTPPPC

SEQ ID NO: 4225 - protein, 10 aa, Artificial Sequence
  Synthetic Peptide
KSCDTPPPCP

SEQ ID NO: 4226 - protein, 10 aa, Artificial Sequence
  Synthetic Peptide
SCDTPPPCPR

SEQ ID NO: 4227 - protein, 10 aa, Artificial Sequence
  Synthetic Peptide
CDTPPPCPRC

SEQ ID NO: 4228 - protein, 10 aa, Artificial Sequence
  Synthetic Peptide
DTPPPCPRCP

SEQ ID NO: 4229 - protein, 10 aa, Artificial Sequence
  Synthetic Peptide
TPPPCPRCPE

SEQ ID NO: 4230 - protein, 10 aa, Artificial Sequence
  Synthetic Peptide
PPPCPRCPEP

SEQ ID NO: 4231 - protein, 10 aa, Artificial Sequence
  Synthetic Peptide
PPCPRCPEPK

SEQ ID NO: 4232 - protein, 10 aa, Artificial Sequence
  Synthetic Peptide
PCPRCPEPKS

SEQ ID NO: 4233 - protein, 10 aa, Artificial Sequence
  Synthetic Peptide
CPRCPEPKSC

SEQ ID NO: 4234 - protein, 10 aa, Artificial Sequence
  Synthetic Peptide
PRCPEPKSCD

SEQ ID NO: 4235 - protein, 10 aa, Artificial Sequence
  Synthetic Peptide
RCPEPKSCDT

SEQ ID NO: 4236 - protein, 10 aa, Artificial Sequence
  Synthetic Peptide
CPEPKSCDTP

SEQ ID NO: 4237 - protein, 10 aa, Artificial Sequence
  Synthetic Peptide
PEPKSCDTPP

SEQ ID NO: 4238 - protein, 10 aa, Artificial Sequence
  Synthetic Peptide
EPKSCDTPPP

SEQ ID NO: 4239 - protein, 10 aa, Artificial Sequence
  Synthetic Peptide
PKSCDTPPPC

SEQ ID NO: 4240 - protein, 10 aa, Artificial Sequence
  Synthetic Peptide
KSCDTPPPCP

SEQ ID NO: 4241 - protein, 10 aa, Artificial Sequence
  Synthetic Peptide
SCDTPPPCPR

SEQ ID NO: 4242 - protein, 10 aa, Artificial Sequence
  Synthetic Peptide
CDTPPPCPRC

SEQ ID NO: 4243 - protein, 10 aa, Artificial Sequence
  Synthetic Peptide
DTPPPCPRCP

SEQ ID NO: 4244 - protein, 9 aa, Artificial Sequence
  Synthetic Peptide
ELKTPLGDT

SEQ ID NO: 4245 - protein, 9 aa, Artificial Sequence
  Synthetic Peptide
LKTPLGDTT

SEQ ID NO: 4246 - protein, 9 aa, Artificial Sequence
  Synthetic Peptide
KTPLGDTTH

SEQ ID NO: 4247 - protein, 9 aa, Artificial Sequence
  Synthetic Peptide
TPLGDTTHT

SEQ ID NO: 4248 - protein, 9 aa, Artificial Sequence
  Synthetic Peptide
PLGDTTHTC

SEQ ID NO: 4249 - protein, 9 aa, Artificial Sequence
  Synthetic Peptide
LGDTTHTCP

SEQ ID NO: 4250 - protein, 9 aa, Artificial Sequence
  Synthetic Peptide
GDTTHTCPR

SEQ ID NO: 4251 - protein, 9 aa, Artificial Sequence
  Synthetic Peptide
DTTHTCPRC

SEQ ID NO: 4252 - protein, 9 aa, Artificial Sequence
  Synthetic Peptide
TTHTCPRCP

SEQ ID NO: 4253 - protein, 9 aa, Artificial Sequence
  Synthetic Peptide
THTCPRCPE

SEQ ID NO: 4254 - protein, 9 aa, Artificial Sequence
  Synthetic Peptide
HTCPRCPEP

SEQ ID NO: 4255 - protein, 9 aa, Artificial Sequence
  Synthetic Peptide
TCPRCPEPK

SEQ ID NO: 4256 - protein, 9 aa, Artificial Sequence
  Synthetic Peptide
CPRCPEPKS

SEQ ID NO: 4257 - protein, 9 aa, Artificial Sequence
  Synthetic Peptide
PRCPEPKSC

SEQ ID NO: 4258 - protein, 9 aa, Artificial Sequence
  Synthetic Peptide
RCPEPKSCD

SEQ ID NO: 4259 - protein, 9 aa, Artificial Sequence
  Synthetic Peptide
CPEPKSCDT

SEQ ID NO: 4260 - protein, 9 aa, Artificial Sequence
  Synthetic Peptide
PEPKSCDTP

SEQ ID NO: 4261 - protein, 9 aa, Artificial Sequence
  Synthetic Peptide
EPKSCDTPP

SEQ ID NO: 4262 - protein, 9 aa, Artificial Sequence
  Synthetic Peptide
PKSCDTPPP

SEQ ID NO: 4263 - protein, 9 aa, Artificial Sequence
  Synthetic Peptide
KSCDTPPPC

SEQ ID NO: 4264 - protein, 9 aa, Artificial Sequence
  Synthetic Peptide
SCDTPPPCP

SEQ ID NO: 4265 - protein, 9 aa, Artificial Sequence
  Synthetic Peptide
CDTPPPCPR

SEQ ID NO: 4266 - protein, 9 aa, Artificial Sequence
  Synthetic Peptide
DTPPPCPRC

SEQ ID NO: 4267 - protein, 9 aa, Artificial Sequence
  Synthetic Peptide
TPPPCPRCP

SEQ ID NO: 4268 - protein, 9 aa, Artificial Sequence
  Synthetic Peptide
PPPCPRCPE

SEQ ID NO: 4269 - protein, 9 aa, Artificial Sequence
  Synthetic Peptide
PPCPRCPEP

SEQ ID NO: 4270 - protein, 9 aa, Artificial Sequence
  Synthetic Peptide
PCPRCPEPK

SEQ ID NO: 4271 - protein, 9 aa, Artificial Sequence
  Synthetic Peptide
CPRCPEPKS

SEQ ID NO: 4272 - protein, 9 aa, Artificial Sequence
  Synthetic Peptide
PRCPEPKSC

SEQ ID NO: 4273 - protein, 9 aa, Artificial Sequence
  Synthetic Peptide
RCPEPKSCD

SEQ ID NO: 4274 - protein, 9 aa, Artificial Sequence
  Synthetic Peptide
CPEPKSCDT

SEQ ID NO: 4275 - protein, 9 aa, Artificial Sequence
  Synthetic Peptide
PEPKSCDTP

SEQ ID NO: 4276 - protein, 9 aa, Artificial Sequence
  Synthetic Peptide
EPKSCDTPP

SEQ ID NO: 4277 - protein, 9 aa, Artificial Sequence
  Synthetic Peptide
PKSCDTPPP

SEQ ID NO: 4278 - protein, 9 aa, Artificial Sequence
  Synthetic Peptide
KSCDTPPPC

SEQ ID NO: 4279 - protein, 9 aa, Artificial Sequence
  Synthetic Peptide
SCDTPPPCP

SEQ ID NO: 4280 - protein, 9 aa, Artificial Sequence
  Synthetic Peptide
CDTPPPCPR

SEQ ID NO: 4281 - protein, 9 aa, Artificial Sequence
  Synthetic Peptide
DTPPPCPRC

SEQ ID NO: 4282 - protein, 9 aa, Artificial Sequence
  Synthetic Peptide
TPPPCPRCP

SEQ ID NO: 4283 - protein, 9 aa, Artificial Sequence
  Synthetic Peptide
PPPCPRCPE

SEQ ID NO: 4284 - protein, 9 aa, Artificial Sequence
  Synthetic Peptide
PPCPRCPEP

SEQ ID NO: 4285 - protein, 9 aa, Artificial Sequence
  Synthetic Peptide
PCPRCPEPK

SEQ ID NO: 4286 - protein, 9 aa, Artificial Sequence
  Synthetic Peptide
CPRCPEPKS

SEQ ID NO: 4287 - protein, 9 aa, Artificial Sequence
  Synthetic Peptide
PRCPEPKSC

SEQ ID NO: 4288 - protein, 9 aa, Artificial Sequence
  Synthetic Peptide
RCPEPKSCD

SEQ ID NO: 4289 - protein, 9 aa, Artificial Sequence
  Synthetic Peptide
CPEPKSCDT

SEQ ID NO: 4290 - protein, 9 aa, Artificial Sequence
  Synthetic Peptide
PEPKSCDTP

SEQ ID NO: 4291 - protein, 9 aa, Artificial Sequence
  Synthetic Peptide
EPKSCDTPP

SEQ ID NO: 4292 - protein, 9 aa, Artificial Sequence
  Synthetic Peptide
PKSCDTPPP

SEQ ID NO: 4293 - protein, 9 aa, Artificial Sequence
  Synthetic Peptide
KSCDTPPPC

SEQ ID NO: 4294 - protein, 9 aa, Artificial Sequence
  Synthetic Peptide
SCDTPPPCP

SEQ ID NO: 4295 - protein, 9 aa, Artificial Sequence
  Synthetic Peptide
CDTPPPCPR

SEQ ID NO: 4296 - protein, 9 aa, Artificial Sequence
  Synthetic Peptide
DTPPPCPRC

SEQ ID NO: 4297 - protein, 9 aa, Artificial Sequence
  Synthetic Peptide
TPPPCPRCP

SEQ ID NO: 4298 - protein, 8 aa, Artificial Sequence
  Synthetic Peptide
ELKTPLGD

SEQ ID NO: 4299 - protein, 8 aa, Artificial Sequence
  Synthetic Peptide
LKTPLGDT

SEQ ID NO: 4300 - protein, 8 aa, Artificial Sequence
  Synthetic Peptide
KTPLGDTT

SEQ ID NO: 4301 - protein, 8 aa, Artificial Sequence
  Synthetic Peptide
TPLGDTTH

SEQ ID NO: 4302 - protein, 8 aa, Artificial Sequence
  Synthetic Peptide
PLGDTTHT

SEQ ID NO: 4303 - protein, 8 aa, Artificial Sequence
  Synthetic Peptide
LGDTTHTC

SEQ ID NO: 4304 - protein, 8 aa, Artificial Sequence
  Synthetic Peptide
GDTTHTCP

SEQ ID NO: 4305 - protein, 8 aa, Artificial Sequence
  Synthetic Peptide
DTTHTCPR

SEQ ID NO: 4306 - protein, 8 aa, Artificial Sequence
  Synthetic Peptide
TTHTCPRC

SEQ ID NO: 4307 - protein, 8 aa, Artificial Sequence
  Synthetic Peptide
THTCPRCP

SEQ ID NO: 4308 - protein, 8 aa, Artificial Sequence
  Synthetic Peptide
HTCPRCPE

SEQ ID NO: 4309 - protein, 8 aa, Artificial Sequence
  Synthetic Peptide
TCPRCPEP

SEQ ID NO: 4310 - protein, 8 aa, Artificial Sequence
  Synthetic Peptide
CPRCPEPK

SEQ ID NO: 4311 - protein, 8 aa, Artificial Sequence
  Synthetic Peptide
PRCPEPKS

SEQ ID NO: 4312 - protein, 8 aa, Artificial Sequence
  Synthetic Peptide
RCPEPKSC

SEQ ID NO: 4313 - protein, 8 aa, Artificial Sequence
  Synthetic Peptide
CPEPKSCD

SEQ ID NO: 4314 - protein, 8 aa, Artificial Sequence
  Synthetic Peptide
PEPKSCDT

SEQ ID NO: 4315 - protein, 8 aa, Artificial Sequence
  Synthetic Peptide
EPKSCDTP

SEQ ID NO: 4316 - protein, 8 aa, Artificial Sequence
  Synthetic Peptide
PKSCDTPP

SEQ ID NO: 4317 - protein, 8 aa, Artificial Sequence
  Synthetic Peptide
KSCDTPPP

SEQ ID NO: 4318 - protein, 8 aa, Artificial Sequence
  Synthetic Peptide
SCDTPPPC

SEQ ID NO: 4319 - protein, 8 aa, Artificial Sequence
  Synthetic Peptide
CDTPPPCP

SEQ ID NO: 4320 - protein, 8 aa, Artificial Sequence
  Synthetic Peptide
DTPPPCPR

SEQ ID NO: 4321 - protein, 8 aa, Artificial Sequence
  Synthetic Peptide
TPPPCPRC

SEQ ID NO: 4322 - protein, 8 aa, Artificial Sequence
  Synthetic Peptide
PPPCPRCP

SEQ ID NO: 4323 - protein, 8 aa, Artificial Sequence
  Synthetic Peptide
PPCPRCPE

SEQ ID NO: 4324 - protein, 8 aa, Artificial Sequence
  Synthetic Peptide
PCPRCPEP

SEQ ID NO: 4325 - protein, 8 aa, Artificial Sequence
  Synthetic Peptide
CPRCPEPK

SEQ ID NO: 4326 - protein, 8 aa, Artificial Sequence
  Synthetic Peptide
PRCPEPKS

SEQ ID NO: 4327 - protein, 8 aa, Artificial Sequence
  Synthetic Peptide
RCPEPKSC

SEQ ID NO: 4328 - protein, 8 aa, Artificial Sequence
  Synthetic Peptide
CPEPKSCD

SEQ ID NO: 4329 - protein, 8 aa, Artificial Sequence
  Synthetic Peptide
PEPKSCDT

SEQ ID NO: 4330 - protein, 8 aa, Artificial Sequence
  Synthetic Peptide
EPKSCDTP

SEQ ID NO: 4331 - protein, 8 aa, Artificial Sequence
  Synthetic Peptide
PKSCDTPP

SEQ ID NO: 4332 - protein, 8 aa, Artificial Sequence
  Synthetic Peptide
KSCDTPPP

SEQ ID NO: 4333 - protein, 8 aa, Artificial Sequence
  Synthetic Peptide
SCDTPPPC

SEQ ID NO: 4334 - protein, 8 aa, Artificial Sequence
  Synthetic Peptide
CDTPPPCP

SEQ ID NO: 4335 - protein, 8 aa, Artificial Sequence
  Synthetic Peptide
DTPPPCPR

SEQ ID NO: 4336 - protein, 8 aa, Artificial Sequence
  Synthetic Peptide
TPPPCPRC

SEQ ID NO: 4337 - protein, 8 aa, Artificial Sequence
  Synthetic Peptide
PPPCPRCP

SEQ ID NO: 4338 - protein, 8 aa, Artificial Sequence
  Synthetic Peptide
PPCPRCPE

SEQ ID NO: 4339 - protein, 8 aa, Artificial Sequence
  Synthetic Peptide
PCPRCPEP

SEQ ID NO: 4340 - protein, 8 aa, Artificial Sequence
  Synthetic Peptide
CPRCPEPK

SEQ ID NO: 4341 - protein, 8 aa, Artificial Sequence
  Synthetic Peptide
PRCPEPKS

SEQ ID NO: 4342 - protein, 8 aa, Artificial Sequence
  Synthetic Peptide
RCPEPKSC

SEQ ID NO: 4343 - protein, 8 aa, Artificial Sequence
  Synthetic Peptide
CPEPKSCD

SEQ ID NO: 4344 - protein, 8 aa, Artificial Sequence
  Synthetic Peptide
PEPKSCDT

SEQ ID NO: 4345 - protein, 8 aa, Artificial Sequence
  Synthetic Peptide
EPKSCDTP

SEQ ID NO: 4346 - protein, 8 aa, Artificial Sequence
  Synthetic Peptide
PKSCDTPP

SEQ ID NO: 4347 - protein, 8 aa, Artificial Sequence
  Synthetic Peptide
KSCDTPPP

SEQ ID NO: 4348 - protein, 8 aa, Artificial Sequence
  Synthetic Peptide
SCDTPPPC

SEQ ID NO: 4349 - protein, 8 aa, Artificial Sequence
  Synthetic Peptide
CDTPPPCP

SEQ ID NO: 4350 - protein, 8 aa, Artificial Sequence
  Synthetic Peptide
DTPPPCPR

SEQ ID NO: 4351 - protein, 8 aa, Artificial Sequence
  Synthetic Peptide
TPPPCPRC

SEQ ID NO: 4352 - protein, 8 aa, Artificial Sequence
  Synthetic Peptide
PPPCPRCP

SEQ ID NO: 4353 - protein, 12 aa, Artificial Sequence
  Synthetic Peptide
ESKYGPPCPSCP

SEQ ID NO: 4354 - protein, 11 aa, Artificial Sequence
  Synthetic Peptide
ESKYGPPCPSC

SEQ ID NO: 4355 - protein, 11 aa, Artificial Sequence
  Synthetic Peptide
SKYGPPCPSCP

SEQ ID NO: 4356 - protein, 10 aa, Artificial Sequence
  Synthetic Peptide
ESKYGPPCPS

SEQ ID NO: 4357 - protein, 10 aa, Artificial Sequence
  Synthetic Peptide
SKYGPPCPSC

SEQ ID NO: 4358 - protein, 10 aa, Artificial Sequence
  Synthetic Peptide
KYGPPCPSCP

SEQ ID NO: 4359 - protein, 9 aa, Artificial Sequence
  Synthetic Peptide
ESKYGPPCP

SEQ ID NO: 4360 - protein, 9 aa, Artificial Sequence
  Synthetic Peptide
SKYGPPCPS

SEQ ID NO: 4361 - protein, 9 aa, Artificial Sequence
  Synthetic Peptide
KYGPPCPSC

SEQ ID NO: 4362 - protein, 9 aa, Artificial Sequence
  Synthetic Peptide
YGPPCPSCP

SEQ ID NO: 4363 - protein, 8 aa, Artificial Sequence
  Synthetic Peptide
ESKYGPPC

SEQ ID NO: 4364 - protein, 8 aa, Artificial Sequence
  Synthetic Peptide
SKYGPPCP

SEQ ID NO: 4365 - protein, 8 aa, Artificial Sequence
  Synthetic Peptide
KYGPPCPS

SEQ ID NO: 4366 - protein, 8 aa, Artificial Sequence
  Synthetic Peptide
YGPPCPSC

SEQ ID NO: 4367 - protein, 8 aa, Artificial Sequence
  Synthetic Peptide
GPPCPSCP

SEQ ID NO: 4368 - protein, 7 aa, Artificial Sequence
  Synthetic Peptide
ESKYGPP

SEQ ID NO: 4369 - protein, 7 aa, Artificial Sequence
  Synthetic Peptide
SKYGPPC

SEQ ID NO: 4370 - protein, 7 aa, Artificial Sequence
  Synthetic Peptide
KYGPPCP

SEQ ID NO: 4371 - protein, 7 aa, Artificial Sequence
  Synthetic Peptide
YGPPCPS

SEQ ID NO: 4372 - protein, 7 aa, Artificial Sequence
  Synthetic Peptide
GPPCPSC

SEQ ID NO: 4373 - protein, 7 aa, Artificial Sequence
  Synthetic Peptide
PPCPSCP

SEQ ID NO: 4374 - protein, 19 aa, Artificial Sequence
  Synthetic Peptide
WVDNKTFSVCSRDFTPPTV

SEQ ID NO: 4375 - protein, 18 aa, Artificial Sequence
  Synthetic Peptide
WVDNKTFSVCSRDFTPPT

SEQ ID NO: 4376 - protein, 18 aa, Artificial Sequence
  Synthetic Peptide
VDNKTFSVCSRDFTPPTV

SEQ ID NO: 4377 - protein, 17 aa, Artificial Sequence
  Synthetic Peptide
WVDNKTFSVCSRDFTPP

SEQ ID NO: 4378 - protein, 17 aa, Artificial Sequence
  Synthetic Peptide
VDNKTFSVCSRDFTPPT

SEQ ID NO: 4379 - protein, 17 aa, Artificial Sequence
  Synthetic Peptide
DNKTFSVCSRDFTPPTV

SEQ ID NO: 4380 - protein, 16 aa, Artificial Sequence
  Synthetic Peptide
WVDNKTFSVCSRDFTP

SEQ ID NO: 4381 - protein, 16 aa, Artificial Sequence
  Synthetic Peptide
VDNKTFSVCSRDFTPP

SEQ ID NO: 4382 - protein, 16 aa, Artificial Sequence
  Synthetic Peptide
DNKTFSVCSRDFTPPT

SEQ ID NO: 4383 - protein, 16 aa, Artificial Sequence
  Synthetic Peptide
NKTFSVCSRDFTPPTV

SEQ ID NO: 4384 - protein, 15 aa, Artificial Sequence
  Synthetic Peptide
WVDNKTFSVCSRDFT

SEQ ID NO: 4385 - protein, 15 aa, Artificial Sequence
  Synthetic Peptide
VDNKTFSVCSRDFTP

SEQ ID NO: 4386 - protein, 15 aa, Artificial Sequence
  Synthetic Peptide
DNKTFSVCSRDFTPP

SEQ ID NO: 4387 - protein, 15 aa, Artificial Sequence
  Synthetic Peptide
NKTFSVCSRDFTPPT

SEQ ID NO: 4388 - protein, 15 aa, Artificial Sequence
  Synthetic Peptide
KTFSVCSRDFTPPTV

SEQ ID NO: 4389 - protein, 14 aa, Artificial Sequence
  Synthetic Peptide
WVDNKTFSVCSRDF

SEQ ID NO: 4390 - protein, 14 aa, Artificial Sequence
  Synthetic Peptide
VDNKTFSVCSRDFT

SEQ ID NO: 4391 - protein, 14 aa, Artificial Sequence
  Synthetic Peptide
DNKTFSVCSRDFTP

SEQ ID NO: 4392 - protein, 14 aa, Artificial Sequence
  Synthetic Peptide
NKTFSVCSRDFTPP

SEQ ID NO: 4393 - protein, 14 aa, Artificial Sequence
  Synthetic Peptide
KTFSVCSRDFTPPT

SEQ ID NO: 4394 - protein, 14 aa, Artificial Sequence
  Synthetic Peptide
TFSVCSRDFTPPTV

SEQ ID NO: 4395 - protein, 13 aa, Artificial Sequence
  Synthetic Peptide
WVDNKTFSVCSRD

SEQ ID NO: 4396 - protein, 13 aa, Artificial Sequence
  Synthetic Peptide
VDNKTFSVCSRDF

SEQ ID NO: 4397 - protein, 13 aa, Artificial Sequence
  Synthetic Peptide
DNKTFSVCSRDFT

SEQ ID NO: 4398 - protein, 13 aa, Artificial Sequence
  Synthetic Peptide
NKTFSVCSRDFTP

SEQ ID NO: 4399 - protein, 13 aa, Artificial Sequence
  Synthetic Peptide
KTFSVCSRDFTPP

SEQ ID NO: 4400 - protein, 13 aa, Artificial Sequence
  Synthetic Peptide
TFSVCSRDFTPPT

SEQ ID NO: 4401 - protein, 13 aa, Artificial Sequence
  Synthetic Peptide
FSVCSRDFTPPTV

SEQ ID NO: 4402 - protein, 12 aa, Artificial Sequence
  Synthetic Peptide
WVDNKTFSVCSR

SEQ ID NO: 4403 - protein, 12 aa, Artificial Sequence
  Synthetic Peptide
VDNKTFSVCSRD

SEQ ID NO: 4404 - protein, 12 aa, Artificial Sequence
  Synthetic Peptide
DNKTFSVCSRDF

SEQ ID NO: 4405 - protein, 12 aa, Artificial Sequence
  Synthetic Peptide
NKTFSVCSRDFT

SEQ ID NO: 4406 - protein, 12 aa, Artificial Sequence
  Synthetic Peptide
KTFSVCSRDFTP

SEQ ID NO: 4407 - protein, 12 aa, Artificial Sequence
  Synthetic Peptide
TFSVCSRDFTPP

SEQ ID NO: 4408 - protein, 12 aa, Artificial Sequence
  Synthetic Peptide
FSVCSRDFTPPT

SEQ ID NO: 4409 - protein, 12 aa, Artificial Sequence
  Synthetic Peptide
SVCSRDFTPPTV

SEQ ID NO: 4410 - protein, 11 aa, Artificial Sequence
  Synthetic Peptide
WVDNKTFSVCS

SEQ ID NO: 4411 - protein, 11 aa, Artificial Sequence
  Synthetic Peptide
VDNKTFSVCSR

SEQ ID NO: 4412 - protein, 11 aa, Artificial Sequence
  Synthetic Peptide
DNKTFSVCSRD

SEQ ID NO: 4413 - protein, 11 aa, Artificial Sequence
  Synthetic Peptide
NKTFSVCSRDF

SEQ ID NO: 4414 - protein, 11 aa, Artificial Sequence
  Synthetic Peptide
KTFSVCSRDFT

SEQ ID NO: 4415 - protein, 11 aa, Artificial Sequence
  Synthetic Peptide
TFSVCSRDFTP

SEQ ID NO: 4416 - protein, 11 aa, Artificial Sequence
  Synthetic Peptide
FSVCSRDFTPP

SEQ ID NO: 4417 - protein, 11 aa, Artificial Sequence
  Synthetic Peptide
SVCSRDFTPPT

SEQ ID NO: 4418 - protein, 11 aa, Artificial Sequence
  Synthetic Peptide
VCSRDFTPPTV

SEQ ID NO: 4419 - protein, 10 aa, Artificial Sequence
  Synthetic Peptide
WVDNKTFSVC

SEQ ID NO: 4420 - protein, 10 aa, Artificial Sequence
  Synthetic Peptide
VDNKTFSVCS

SEQ ID NO: 4421 - protein, 10 aa, Artificial Sequence
  Synthetic Peptide
DNKTFSVCSR

SEQ ID NO: 4422 - protein, 10 aa, Artificial Sequence
  Synthetic Peptide
NKTFSVCSRD

SEQ ID NO: 4423 - protein, 10 aa, Artificial Sequence
  Synthetic Peptide
KTFSVCSRDF

SEQ ID NO: 4424 - protein, 10 aa, Artificial Sequence
  Synthetic Peptide
TFSVCSRDFT

SEQ ID NO: 4425 - protein, 10 aa, Artificial Sequence
  Synthetic Peptide
FSVCSRDFTP

SEQ ID NO: 4426 - protein, 10 aa, Artificial Sequence
  Synthetic Peptide
SVCSRDFTPP

SEQ ID NO: 4427 - protein, 10 aa, Artificial Sequence
  Synthetic Peptide
VCSRDFTPPT

SEQ ID NO: 4428 - protein, 10 aa, Artificial Sequence
  Synthetic Peptide
CSRDFTPPTV

SEQ ID NO: 4429 - protein, 9 aa, Artificial Sequence
  Synthetic Peptide
WVDNKTFSV

SEQ ID NO: 4430 - protein, 9 aa, Artificial Sequence
  Synthetic Peptide
VDNKTFSVC

SEQ ID NO: 4431 - protein, 9 aa, Artificial Sequence
  Synthetic Peptide
DNKTFSVCS

SEQ ID NO: 4432 - protein, 9 aa, Artificial Sequence
  Synthetic Peptide
NKTFSVCSR

SEQ ID NO: 4433 - protein, 9 aa, Artificial Sequence
  Synthetic Peptide
KTFSVCSRD

SEQ ID NO: 4434 - protein, 9 aa, Artificial Sequence
  Synthetic Peptide
TFSVCSRDF

SEQ ID NO: 4435 - protein, 9 aa, Artificial Sequence
  Synthetic Peptide
FSVCSRDFT

SEQ ID NO: 4436 - protein, 9 aa, Artificial Sequence
  Synthetic Peptide
SVCSRDFTP

SEQ ID NO: 4437 - protein, 9 aa, Artificial Sequence
  Synthetic Peptide
VCSRDFTPP

SEQ ID NO: 4438 - protein, 9 aa, Artificial Sequence
  Synthetic Peptide
CSRDFTPPT

SEQ ID NO: 4439 - protein, 9 aa, Artificial Sequence
  Synthetic Peptide
SRDFTPPTV

SEQ ID NO: 4440 - protein, 8 aa, Artificial Sequence
  Synthetic Peptide
WVDNKTFS

SEQ ID NO: 4441 - protein, 8 aa, Artificial Sequence
  Synthetic Peptide
VDNKTFSV

SEQ ID NO: 4442 - protein, 8 aa, Artificial Sequence
  Synthetic Peptide
DNKTFSVC

SEQ ID NO: 4443 - protein, 8 aa, Artificial Sequence
  Synthetic Peptide
NKTFSVCS

SEQ ID NO: 4444 - protein, 8 aa, Artificial Sequence
  Synthetic Peptide
KTFSVCSR

SEQ ID NO: 4445 - protein, 8 aa, Artificial Sequence
  Synthetic Peptide
TFSVCSRD

SEQ ID NO: 4446 - protein, 8 aa, Artificial Sequence
  Synthetic Peptide
FSVCSRDF

SEQ ID NO: 4447 - protein, 8 aa, Artificial Sequence
  Synthetic Peptide
SVCSRDFT

SEQ ID NO: 4448 - protein, 8 aa, Artificial Sequence
  Synthetic Peptide
VCSRDFTP

SEQ ID NO: 4449 - protein, 8 aa, Artificial Sequence
  Synthetic Peptide
CSRDFTPP

SEQ ID NO: 4450 - protein, 8 aa, Artificial Sequence
  Synthetic Peptide
SRDFTPPT

SEQ ID NO: 4451 - protein, 8 aa, Artificial Sequence
  Synthetic Peptide
RDFTPPTV

SEQ ID NO: 4452 - protein, 7 aa, Artificial Sequence
  Synthetic Peptide
WVDNKTF

SEQ ID NO: 4453 - protein, 7 aa, Artificial Sequence
  Synthetic Peptide
VDNKTFS

SEQ ID NO: 4454 - protein, 7 aa, Artificial Sequence
  Synthetic Peptide
DNKTFSV

SEQ ID NO: 4455 - protein, 7 aa, Artificial Sequence
  Synthetic Peptide
NKTFSVC

SEQ ID NO: 4456 - protein, 7 aa, Artificial Sequence
  Synthetic Peptide
KTFSVCS

SEQ ID NO: 4457 - protein, 7 aa, Artificial Sequence
  Synthetic Peptide
TFSVCSR

SEQ ID NO: 4458 - protein, 7 aa, Artificial Sequence
  Synthetic Peptide
FSVCSRD

SEQ ID NO: 4459 - protein, 7 aa, Artificial Sequence
  Synthetic Peptide
SVCSRDF

SEQ ID NO: 4460 - protein, 7 aa, Artificial Sequence
  Synthetic Peptide
VCSRDFT

SEQ ID NO: 4461 - protein, 7 aa, Artificial Sequence
  Synthetic Peptide
CSRDFTP

SEQ ID NO: 4462 - protein, 7 aa, Artificial Sequence
  Synthetic Peptide
SRDFTPP

SEQ ID NO: 4463 - protein, 7 aa, Artificial Sequence
  Synthetic Peptide
RDFTPPT

SEQ ID NO: 4464 - protein, 7 aa, Artificial Sequence
  Synthetic Peptide
DFTPPTV

SEQ ID NO: 4465 - protein, 26 aa, Artificial Sequence
  Synthetic Peptide
PLPVIAELPPKVSVFVPPRDGFFGNP

SEQ ID NO: 4466 - protein, 17 aa, Artificial Sequence
  Synthetic Peptide
ELKTPLGDTTHTCPRCP

SEQ ID NO: 4467 - protein, 32 aa, Artificial Sequence; identical to SEQ ID NO: 3278
  Synthetic Peptide

SEQ ID NO: 4468 - protein, 47 aa, Artificial Sequence; identical to SEQ ID NO: 2933
  Synthetic Peptide

SEQ ID NO: 4469 - protein, 62 aa, Artificial Sequence; identical to SEQ ID NO: 2813
  Synthetic Peptide

SEQ ID NO: 4470 - protein, 77 aa, Artificial Sequence
  Synthetic Peptide
ELKTPLGDTTHTCPRCPEPKSCDTPPPCPRCPEPKSCDTPPPCPRCPEPKSCDTPPPCPRCPEPKSCDTPPPCPRCP

SEQ ID NO: 4471 - protein, 92 aa, Artificial Sequence
  Synthetic Peptide
ELKTPLGDTTHTCPRCPEPKSCDTPPPCPRCPEPKSCDTPPPCPRCPEPKSCDTPPPCPRCPEPKSCDTPPPCPRCPEPKSCDTPPPCPRCP

SEQ ID NO: 4472 - protein, 34 aa, Artificial Sequence
  Synthetic Peptide
ELKTPLGDTTHTCPRCPELKTPLGDTTHTCPRCP

SEQ ID NO: 4473 - protein, 51 aa, Artificial Sequence
  Synthetic Peptide
ELKTPLGDTTHTCPRCPELKTPLGDTTHTCPRCPELKTPLGDTTHTCPRCP

SEQ ID NO: 4474 - protein, 68 aa, Artificial Sequence
  Synthetic Peptide
ELKTPLGDTTHTCPRCPELKTPLGDTTHTCPRCPELKTPLGDTTHTCPRCPELKTPLGDTTHTCPRCP

SEQ ID NO: 4475 - protein, 85 aa, Artificial Sequence
  Synthetic Peptide
ELKTPLGDTTHTCPRCPELKTPLGDTTHTCPRCPELKTPLGDTTHTCPRCPELKTPLGDTTHTCPRCPELKTPLGDTTHTCPRCP

SEQ ID NO: 4476 - protein, 102 aa, Artificial Sequence
  Synthetic Peptide
ELKTPLGDTTHTCPRCPELKTPLGDTTHTCPRCPELKTPLGDTTHTCPRCPELKTPLGDTTHTCPRCPELKTPLGDTTHTCPRCPELKTPLGDTTHTCPRCP

SEQ ID NO: 4477 - protein, 15 aa, Artificial Sequence
  Synthetic Peptide
EPKSCDTPPPCPRCP

SEQ ID NO: 4478 - protein, 30 aa, Artificial Sequence; identical to SEQ ID NO: 3358
  Synthetic Peptide

SEQ ID NO: 4479 - protein, 45 aa, Artificial Sequence; identical to SEQ ID NO: 2983
  Synthetic Peptide

SEQ ID NO: 4480 - protein, 60 aa, Artificial Sequence
  Synthetic Peptide
EPKSCDTPPPCPRCPEPKSCDTPPPCPRCPEPKSCDTPPPCPRCPEPKSCDTPPPCPRCP

SEQ ID NO: 4481 - protein, 75 aa, Artificial Sequence
  Synthetic Peptide
EPKSCDTPPPCPRCPEPKSCDTPPPCPRCPEPKSCDTPPPCPRCPEPKSCDTPPPCPRCPEPKSCDTPPPCPRCP

SEQ ID NO: 4482 - protein, 90 aa, Artificial Sequence
  Synthetic Peptide
EPKSCDTPPPCPRCPEPKSCDTPPPCPRCPEPKSCDTPPPCPRCPEPKSCDTPPPCPRCPEPKSCDTPPPCPRCPEPKSCDTPPPCPRCP

SEQ ID NO: 4483 - protein, 32 aa, Artificial Sequence
  Synthetic Peptide
EPKSCDTPPPCPRCPELKTPLGDTTHTCPRCP

SEQ ID NO: 4484 - protein, 49 aa, Artificial Sequence
  Synthetic Peptide
EPKSCDTPPPCPRCPELKTPLGDTTHTCPRCPELKTPLGDTTHTCPRCP

SEQ ID NO: 4485 - protein, 66 aa, Artificial Sequence
  Synthetic Peptide
EPKSCDTPPPCPRCPELKTPLGDTTHTCPRCPELKTPLGDTTHTCPRCPELKTPLGDTTHTCPRCP

SEQ ID NO: 4486 - protein, 83 aa, Artificial Sequence
  Synthetic Peptide
EPKSCDTPPPCPRCPELKTPLGDTTHTCPRCPELKTPLGDTTHTCPRCPELKTPLGDTTHTCPRCPELKTPLGDTTHTCPRCP

SEQ ID NO: 4487 - protein, 100 aa, Artificial Sequence
  Synthetic Peptide
EPKSCDTPPPCPRCPELKTPLGDTTHTCPRCPELKTPLGDTTHTCPRCPELKTPLGDTTHTCPRCPELKTPLGDTTHTCPRCPELKTPLGDTTHTCPRCP

SEQ ID NO: 4488 - protein, 49 aa, Artificial Sequence
  Synthetic Peptide
ELKTPLGDTTHTCPRCPEPKSCDTPPPCPRCPELKTPLGDTTHTCPRCP

SEQ ID NO: 4489 - protein, 47 aa, Artificial Sequence
  Synthetic Peptide
EPKSCDTPPPCPRCPELKTPLGDTTHTCPRCPEPKSCDTPPPCPRCP

SEQ ID NO: 4490 - protein, 64 aa, Artificial Sequence
  Synthetic Peptide
ELKTPLGDTTHTCPRCPEPKSCDTPPPCPRCPELKTPLGDTTHTCPRCPEPKSCDTPPPCPRCP

SEQ ID NO: 4491 - protein, 64 aa, Artificial Sequence
  Synthetic Peptide
EPKSCDTPPPCPRCPELKTPLGDTTHTCPRCPEPKSCDTPPPCPRCPELKTPLGDTTHTCPRCP

SEQ ID NO: 4492 - protein, 81 aa, Artificial Sequence
  Synthetic Peptide
ELKTPLGDTTHTCPRCPEPKSCDTPPPCPRCPELKTPLGDTTHTCPRCPEPKSCDTPPPCPRCPELKTPLGDTTHTCPRCP

SEQ ID NO: 4493 - protein, 79 aa, Artificial Sequence
  Synthetic Peptide
EPKSCDTPPPCPRCPELKTPLGDTTHTCPRCPEPKSCDTPPPCPRCPELKTPLGDTTHTCPRCPEPKSCDTPPPCPRCP

SEQ ID NO: 4494 - protein, 96 aa, Artificial Sequence
  Synthetic Peptide
ELKTPLGDTTHTCPRCPEPKSCDTPPPCPRCPELKTPLGDTTHTCPRCPEPKSCDTPPPCPRCPELKTPLGDTTHTCPRCPEPKSCDTPPPCPRCP

SEQ ID NO: 4495 - protein, 96 aa, Artificial Sequence
  Synthetic Peptide
EPKSCDTPPPCPRCPELKTPLGDTTHTCPRCPEPKSCDTPPPCPRCPELKTPLGDTTHTCPRCPEPKSCDTPPPCPRCPELKTPLGDTTHTCPRCP

SEQ ID NO: 4496 - protein, 119 aa, Artificial Sequence
  Synthetic Peptide
ELKTPLGDTTHTCPRCPELKTPLGDTTHTCPRCPELKTPLGDTTHTCPRCPELKTPLGDTTHTCPRCPELKTPLGDTTHTCPRCPELKTPLGDTTHTCPRCPELKTPLGDTTHTCPRCP

SEQ ID NO: 4497 - protein, 136 aa, Artificial Sequence
  Synthetic Peptide
ELKTPLGDTTHTCPRCPELKTPLGDTTHTCPRCPELKTPLGDTTHTCPRCPELKTPLGDTTHTCPRCPELKTPLGDTTHTCPRCPELKTPLGDTTHTCPRCPELKTPLGDTTHTCPRCPELKTPLGDTTHTCPRCP

SEQ ID NO: 4498 - protein, 153 aa, Artificial Sequence
  Synthetic Peptide
ELKTPLGDTTHTCPRCPELKTPLGDTTHTCPRCPELKTPLGDTTHTCPRCPELKTPLGDTTHTCPRCPELKTPLGDTTHTCPRCPELKTPLGDTTHTCPRCPELKTPLGDTTHTCPRCPELKTPLGDTTHTCPRCPELKTPLGDTTHTCPRCP

SEQ ID NO: 4499 - protein, 170 aa, Artificial Sequence
  Synthetic Peptide
ELKTPLGDTTHTCPRCPELKTPLGDTTHTCPRCPELKTPLGDTTHTCPRCPELKTPLGDTTHTCPRCPELKTPLGDTTHTCPRCPELKTPLGDTTHTCPRCPELKTPLGDTTHTCPRCPELKTPLGDTTHTCPRCPELKTPLGDTTHTCPRCPELKTPLGDTTHTCPRCP

SEQ ID NO: 4500 - protein, 187 aa, Artificial Sequence
  Synthetic Peptide
ELKTPLGDTTHTCPRCPELKTPLGDTTHTCPRCPELKTPLGDTTHTCPRCPELKTPLGDTTHTCPRCPELKTPLGDTTHTCPRCPELKTPLGDTTHTCPRCPELKTPLGDTTHTCPRCPELKTPLGDTTHTCPRCPELKTPLGDTTHTCPRCPELKTPLGDTTHTCPRCPELKTPLGDTTHTCPRCP

SEQ ID NO: 4501 - protein, 204 aa, Artificial Sequence
  Synthetic Peptide
ELKTPLGDTTHTCPRCPELKTPLGDTTHTCPRCPELKTPLGDTTHTCPRCPELKTPLGDTTHTCPRCPELKTPLGDTTHTCPRCPELKTPLGDTTHTCPRCPELKTPLGDTTHTCPRCPELKTPLGDTTHTCPRCPELKTPLGDTTHTCPRCPELKTPLGDTTHTCPRCPELKTPLGDTTHTCPRCPELKTPLGDTTHTCPRCP

SEQ ID NO: 4502 - protein, 221 aa, Artificial Sequence
  Synthetic Peptide
ELKTPLGDTTHTCPRCPELKTPLGDTTHTCPRCPELKTPLGDTTHTCPRCPELKTPLGDTTHTCPRCPELKTPLGDTTHTCPRCPELKTPLGDTTHTCPRCPELKTPLGDTTHTCPRCPELKTPLGDTTHTCPRCPELKTPLGDTTHTCPRCPELKTPLGDTTHTCPRCPELKTPLGDTTHTCPRCPELKTPLGDTTHTCPRCPELKTPLGDTTHTCPRCP

SEQ ID NO: 4503 - protein, 238 aa, Artificial Sequence
  Synthetic Peptide
ELKTPLGDTTHTCPRCPELKTPLGDTTHTCPRCPELKTPLGDTTHTCPRCPELKTPLGDTTHTCPRCPELKTPLGDTTHTCPRCPELKTPLGDTTHTCPRCPELKTPLGDTTHTCPRCPELKTPLGDTTHTCPRCPELKTPLGDTTHTCPRCPELKTPLGDTTHTCPRCPELKTPLGDTTHTCPRCPELKTPLGDTTHTCPRCPELKTPLGDTTHTCPRCPELKTPLGDTTHTCPRCP

SEQ ID NO: 4504 - protein, 255 aa, Artificial Sequence
  Synthetic Peptide
ELKTPLGDTTHTCPRCPELKTPLGDTTHTCPRCPELKTPLGDTTHTCPRCPELKTPLGDTTHTCPRCPELKTPLGDTTHTCPRCPELKTPLGDTTHTCPRCPELKTPLGDTTHTCPRCPELKTPLGDTTHTCPRCPELKTPLGDTTHTCPRCPELKTPLGDTTHTCPRCPELKTPLGDTTHTCPRCPELKTPLGDTTHTCPRCPELKTPLGDTTHTCPRCPELKTPLGDTTHTCPRCPELKTPLGDTTHTCPRCP

SEQ ID NO: 4505 - protein, 272 aa, Artificial Sequence
  Synthetic Peptide
ELKTPLGDTTHTCPRCPELKTPLGDTTHTCPRCPELKTPLGDTTHTCPRCPELKTPLGDTTHTCPRCPELKTPLGDTTHTCPRCPELKTPLGDTTHTCPRCPELKTPLGDTTHTCPRCPELKTPLGDTTHTCPRCPELKTPLGDTTHTCPRCPELKTPLGDTTHTCPRCPELKTPLGDTTHTCPRCPELKTPLGDTTHTCPRCPELKTPLGDTTHTCPRCPELKTPLGDTTHTCPRCPELKTPLGDTTHTCPRCPELKTPLGDTTHTCPRCP

SEQ ID NO: 4506 - protein, 289 aa, Artificial Sequence
  Synthetic Peptide
ELKTPLGDTTHTCPRCPELKTPLGDTTHTCPRCPELKTPLGDTTHTCPRCPELKTPLGDTTHTCPRCPELKTPLGDTTHTCPRCPELKTPLGDTTHTCPRCPELKTPLGDTTHTCPRCPELKTPLGDTTHTCPRCPELKTPLGDTTHTCPRCPELKTPLGDTTHTCPRCPELKTPLGDTTHTCPRCPELKTPLGDTTHTCPRCPELKTPLGDTTHTCPRCPELKTPLGDTTHTCPRCPELKTPLGDTTHTCPRCPELKTPLGDTTHTCPRCPELKTPLGDTTHTCPRCP

SEQ ID NO: 4507 - protein, 105 aa, Artificial Sequence
  Synthetic Peptide
EPKSCDTPPPCPRCPEPKSCDTPPPCPRCPEPKSCDTPPPCPRCPEPKSCDTPPPCPRCPEPKSCDTPPPCPRCPEPKSCDTPPPCPRCPEPKSCDTPPPCPRCP

SEQ ID NO: 4508 - protein, 120 aa, Artificial Sequence
  Synthetic Peptide
EPKSCDTPPPCPRCPEPKSCDTPPPCPRCPEPKSCDTPPPCPRCPEPKSCDTPPPCPRCPEPKSCDTPPPCPRCPEPKSCDTPPPCPRCPEPKSCDTPPPCPRCPEPKSCDTPPPCPRCP

SEQ ID NO: 4509 - protein, 135 aa, Artificial Sequence
  Synthetic Peptide
EPKSCDTPPPCPRCPEPKSCDTPPPCPRCPEPKSCDTPPPCPRCPEPKSCDTPPPCPRCPEPKSCDTPPPCPRCPEPKSCDTPPPCPRCPEPKSCDTPPPCPRCPEPKSCDTPPPCPRCPEPKSCDTPPPCPRCP

SEQ ID NO: 4510 - protein, 150 aa, Artificial Sequence
  Synthetic Peptide
EPKSCDTPPPCPRCPEPKSCDTPPPCPRCPEPKSCDTPPPCPRCPEPKSCDTPPPCPRCPEPKSCDTPPPCPRCPEPKSCDTPPPCPRCPEPKSCDTPPPCPRCPEPKSCDTPPPCPRCPEPKSCDTPPPCPRCPEPKSCDTPPPCPRCP

SEQ ID NO: 4511 - protein, 165 aa, Artificial Sequence
  Synthetic Peptide
EPKSCDTPPPCPRCPEPKSCDTPPPCPRCPEPKSCDTPPPCPRCPEPKSCDTPPPCPRCPEPKSCDTPPPCPRCPEPKSCDTPPPCPRCPEPKSCDTPPPCPRCPEPKSCDTPPPCPRCPEPKSCDTPPPCPRCPEPKSCDTPPPCPRCPEPKSCDTPPPCPRCP

SEQ ID NO: 4512 - protein, 180 aa, Artificial Sequence
  Synthetic Peptide
EPKSCDTPPPCPRCPEPKSCDTPPPCPRCPEPKSCDTPPPCPRCPEPKSCDTPPPCPRCPEPKSCDTPPPCPRCPEPKSCDTPPPCPRCPEPKSCDTPPPCPRCPEPKSCDTPPPCPRCPEPKSCDTPPPCPRCPEPKSCDTPPPCPRCPEPKSCDTPPPCPRCPEPKSCDTPPPCPRCP

SEQ ID NO: 4513 - protein, 195 aa, Artificial Sequence
  Synthetic Peptide
EPKSCDTPPPCPRCPEPKSCDTPPPCPRCPEPKSCDTPPPCPRCPEPKSCDTPPPCPRCPEPKSCDTPPPCPRCPEPKSCDTPPPCPRCPEPKSCDTPPPCPRCPEPKSCDTPPPCPRCPEPKSCDTPPPCPRCPEPKSCDTPPPCPRCPEPKSCDTPPPCPRCPEPKSCDTPPPCPRCPEPKSCDTPPPCPRCP

SEQ ID NO: 4514 - protein, 210 aa, Artificial Sequence
  Synthetic Peptide
EPKSCDTPPPCPRCPEPKSCDTPPPCPRCPEPKSCDTPPPCPRCPEPKSCDTPPPCPRCPEPKSCDTPPPCPRCPEPKSCDTPPPCPRCPEPKSCDTPPPCPRCPEPKSCDTPPPCPRCPEPKSCDTPPPCPRCPEPKSCDTPPPCPRCPEPKSCDTPPPCPRCPEPKSCDTPPPCPRCPEPKSCDTPPPCPRCPEPKSCDTPPPCPRCP

SEQ ID NO: 4515 - protein, 225 aa, Artificial Sequence
  Synthetic Peptide
EPKSCDTPPPCPRCPEPKSCDTPPPCPRCPEPKSCDTPPPCPRCPEPKSCDTPPPCPRCPEPKSCDTPPPCPRCPEPKSCDTPPPCPRCPEPKSCDTPPPCPRCPEPKSCDTPPPCPRCPEPKSCDTPPPCPRCPEPKSCDTPPPCPRCPEPKSCDTPPPCPRCPEPKSCDTPPPCPRCPEPKSCDTPPPCPRCPEPKSCDTPPPCPRCPEPKSCDTPPPCPRCP

SEQ ID NO: 4516 - protein, 240 aa, Artificial Sequence
  Synthetic Peptide
EPKSCDTPPPCPRCPEPKSCDTPPPCPRCPEPKSCDTPPPCPRCPEPKSCDTPPPCPRCPEPKSCDTPPPCPRCPEPKSCDTPPPCPRCPEPKSCDTPPPCPRCPEPKSCDTPPPCPRCPEPKSCDTPPPCPRCPEPKSCDTPPPCPRCPEPKSCDTPPPCPRCPEPKSCDTPPPCPRCPEPKSCDTPPPCPRCPEPKSCDTPPPCPRCPEPKSCDTPPPCPRCPEPKSCDTPPPCPRCP

SEQ ID NO: 4517 - protein, 255 aa, Artificial Sequence
  Synthetic Peptide
EPKSCDTPPPCPRCPEPKSCDTPPPCPRCPEPKSCDTPPPCPRCPEPKSCDTPPPCPRCPEPKSCDTPPPCPRCPEPKSCDTPPPCPRCPEPKSCDTPPPCPRCPEPKSCDTPPPCPRCPEPKSCDTPPPCPRCPEPKSCDTPPPCPRCPEPKSCDTPPPCPRCPEPKSCDTPPPCPRCPEPKSCDTPPPCPRCPEPKSCDTPPPCPRCPEPKSCDTPPPCPRCPEPKSCDTPPPCPRCPEPKSCDTPPPCPRCP

SEQ ID NO: 4518 - protein, 270 aa, Artificial Sequence
  Synthetic Peptide
EPKSCDTPPPCPRCPEPKSCDTPPPCPRCPEPKSCDTPPPCPRCPEPKSCDTPPPCPRCPEPKSCDTPPPCPRCPEPKSCDTPPPCPRCPEPKSCDTPPPCPRCPEPKSCDTPPPCPRCPEPKSCDTPPPCPRCPEPKSCDTPPPCPRCPEPKSCDTPPPCPRCPEPKSCDTPPPCPRCPEPKSCDTPPPCPRCPEPKSCDTPPPCPRCPEPKSCDTPPPCPRCPEPKSCDTPPPCPRCPEPKSCDTPPPCPRCPEPKSCDTPPPCPRCP

SEQ ID NO: 4519 - protein, 4 aa, Artificial Sequence
  Synthetic Peptide
KEIF

SEQ ID NO: 4520 - protein, 5 aa, Artificial Sequence
  Synthetic Peptide
KKEIF

SEQ ID NO: 4521 - protein, 4 aa, Artificial Sequence
  Synthetic Peptide
AVQD

SEQ ID NO: 4522 - protein, 5 aa, Artificial Sequence
  Synthetic Peptide
AVQDL

SEQ ID NO: 4523 - protein, 7 aa, Artificial Sequence
  Synthetic Peptide
VCPPVPP

SEQ ID NO: 4524 - protein, 15 aa, Artificial Sequence
  Synthetic Peptide
VPCPVPPPPPCCHPR

SEQ ID NO: 4525 - protein, 13 aa, Artificial Sequence
  Synthetic Peptide
PCPVPPPPPCCHP

SEQ ID NO: 4526 - protein, 4 aa, Artificial Sequence
  Synthetic Peptide
TVPC

SEQ ID NO: 4527 - protein, 5 aa, Artificial Sequence
  Synthetic Peptide
VTVPC

SEQ ID NO: 4528 - protein, 4 aa, Artificial Sequence
  Synthetic Peptide
PRLS

SEQ ID NO: 4529 - protein, 5 aa, Artificial Sequence
  Synthetic Peptide
PRLSL

SEQ ID NO: 4530 - protein, 10 aa, Artificial Sequence
  Synthetic Peptide
PVPPPPPCCH

SEQ ID NO: 4531 - protein, 4 aa, Artificial Sequence
  Synthetic Peptide
CPPC

SEQ ID NO: 4532 - protein, 4 aa, Artificial Sequence
  Synthetic Peptide
CPSC

SEQ ID NO: 4533 - protein, 8 aa, Artificial Sequence
  Synthetic Peptide
APELLGGP

SEQ ID NO: 4534 - protein, 4 aa, Artificial Sequence
  Synthetic Peptide
APEL

SEQ ID NO: 4535 - protein, 5 aa, Artificial Sequence
  Synthetic Peptide
APELL

SEQ ID NO: 4536 - protein, 6 aa, Artificial Sequence
  Synthetic Peptide
APELLG

SEQ ID NO: 4537 - protein, 7 aa, Artificial Sequence
  Synthetic Peptide
APELLGG

SEQ ID NO: 4538 - protein, 23 aa, Artificial Sequence
  Synthetic Peptide
EPKSCDKTHTCPPCPAPELLGGP

SEQ ID NO: 4539 - protein, 4 aa, Artificial Sequence
  Synthetic Peptide
DKKV

SEQ ID NO: 4540 - protein, 5 aa, Artificial Sequence
  Synthetic Peptide
VDKKV

SEQ ID NO: 4541 - protein, 19 aa, Artificial Sequence
  Synthetic Peptide
ERKCCVEVPPCAPELLGGP

SEQ ID NO: 4542 - protein, 4 aa, Artificial Sequence
  Synthetic Peptide
DKTV

SEQ ID NO: 4543 - protein, 5 aa, Artificial Sequence
  Synthetic Peptide
KDKTV

SEQ ID NO: 4544 - protein, 4 aa, Artificial Sequence
  Synthetic Peptide
PAPP

SEQ ID NO: 4545 - protein, 5 aa, Artificial Sequence
  Synthetic Peptide
PAPPV

SEQ ID NO: 4546 - protein, 15 aa, Artificial Sequence
  Synthetic Peptide
EPKPCDTPPPCPRCP

SEQ ID NO: 4547 - protein, 15 aa, Artificial Sequence
  Synthetic Peptide
EPKSCDIPPPCPRCP

SEQ ID NO: 4548 - protein, 15 aa, Artificial Sequence
  Synthetic Peptide
EPKSCDTPLPCPRCP

SEQ ID NO: 4549 - protein, 15 aa, Artificial Sequence
  Synthetic Peptide
EPKSCDTPPTCPRCP

SEQ ID NO: 4550 - protein, 15 aa, Artificial Sequence
  Synthetic Peptide
EPKSCDTSPPCPRCP

SEQ ID NO: 4551 - protein, 15 aa, Artificial Sequence
  Synthetic Peptide
EPKSCDTPPTCPRCP

SEQ ID NO: 4552 - protein, 69 aa, Artificial Sequence
  Synthetic Peptide
ELKTPLDTTHTCPRCPEPKSCDTPPPCPRCPEPKSCDTPPPCPRCPEPKSCDTPPPCPRCPAPELLGGP

SEQ ID NO: 4553 - protein, 6 aa, Artificial Sequence
  Synthetic Peptide
CDTPPP

SEQ ID NO: 4554 - protein, 4 aa, Artificial Sequence
  Synthetic Peptide
DKRV

SEQ ID NO: 4555 - protein, 5 aa, Artificial Sequence
  Synthetic Peptide
VDKRV

SEQ ID NO: 4556 - protein, 8 aa, Artificial Sequence
  Synthetic Peptide
APEFLGGP

SEQ ID NO: 4557 - protein, 4 aa, Artificial Sequence
  Synthetic Peptide
APEF

SEQ ID NO: 4558 - protein, 5 aa, Artificial Sequence
  Synthetic Peptide
APEFL

SEQ ID NO: 4559 - protein, 6 aa, Artificial Sequence
  Synthetic Peptide
APEFLG

SEQ ID NO: 4560 - protein, 7 aa, Artificial Sequence
  Synthetic Peptide
APEFLGG

SEQ ID NO: 4561 - protein, 20 aa, Artificial Sequence
  Synthetic Peptide
ESKYGPPCPSCPAPEFLGGP

SEQ ID NO: 4562 - protein, 4 aa, Artificial Sequence
  Synthetic Peptide
SSTD

SEQ ID NO: 4563 - protein, 5 aa, Artificial Sequence
  Synthetic Peptide
PSSTD

SEQ ID NO: 4564 - protein, 4 aa, Artificial Sequence
  Synthetic Peptide
KILQ

SEQ ID NO: 4565 - protein, 5 aa, Artificial Sequence
  Synthetic Peptide
KILQS

SEQ ID NO: 4566 - protein, 19 aa, Artificial Sequence
  Synthetic Peptide
VIAELPPKVSVFVPPRDGF

SEQ ID NO: 4567 - protein, 19 aa, Artificial Sequence
  Synthetic Peptide
IAELPPKVSVFVPPRDGFF

SEQ ID NO: 4568 - protein, 19 aa, Artificial Sequence
  Synthetic Peptide
AELPPKVSVFVPPRDGFFG

SEQ ID NO: 4569 - protein, 19 aa, Artificial Sequence
  Synthetic Peptide
ELPPKVSVFVPPRDGFFGN

SEQ ID NO: 4570 - protein, 19 aa, Artificial Sequence
  Synthetic Peptide
LPPKVSVFVPPRDGFFGNP

SEQ ID NO: 4571 - protein, 18 aa, Artificial Sequence
  Synthetic Peptide
PLPVIAELPPKVSVFVPP

SEQ ID NO: 4572 - protein, 18 aa, Artificial Sequence
  Synthetic Peptide
LPVIAELPPKVSVFVPPR

SEQ ID NO: 4573 - protein, 18 aa, Artificial Sequence
  Synthetic Peptide
PVIAELPPKVSVFVPPRD

SEQ ID NO: 4574 - protein, 18 aa, Artificial Sequence
  Synthetic Peptide
VIAELPPKVSVFVPPRDG

SEQ ID NO: 4575 - protein, 18 aa, Artificial Sequence
  Synthetic Peptide
IAELPPKVSVFVPPRDGF

SEQ ID NO: 4576 - protein, 18 aa, Artificial Sequence
  Synthetic Peptide
AELPPKVSVFVPPRDGFF

SEQ ID NO: 4577 - protein, 18 aa, Artificial Sequence
  Synthetic Peptide
ELPPKVSVFVPPRDGFFG

SEQ ID NO: 4578 - protein, 18 aa, Artificial Sequence
  Synthetic Peptide
LPPKVSVFVPPRDGFFGN

SEQ ID NO: 4579 - protein, 18 aa, Artificial Sequence
  Synthetic Peptide
PPKVSVFVPPRDGFFGNP

SEQ ID NO: 4580 - protein, 17 aa, Artificial Sequence
  Synthetic Peptide
PLPVIAELPPKVSVFVP

SEQ ID NO: 4581 - protein, 17 aa, Artificial Sequence
  Synthetic Peptide
LPVIAELPPKVSVFVPP

SEQ ID NO: 4582 - protein, 17 aa, Artificial Sequence
  Synthetic Peptide
PVIAELPPKVSVFVPPR

SEQ ID NO: 4583 - protein, 17 aa, Artificial Sequence
  Synthetic Peptide
VIAELPPKVSVFVPPRD

SEQ ID NO: 4584 - protein, 17 aa, Artificial Sequence
  Synthetic Peptide
IAELPPKVSVFVPPRDG

SEQ ID NO: 4585 - protein, 17 aa, Artificial Sequence
  Synthetic Peptide
AELPPKVSVFVPPRDGF

SEQ ID NO: 4586 - protein, 17 aa, Artificial Sequence
  Synthetic Peptide
ELPPKVSVFVPPRDGFF

SEQ ID NO: 4587 - protein, 17 aa, Artificial Sequence
  Synthetic Peptide
LPPKVSVFVPPRDGFFG

SEQ ID NO: 4588 - protein, 17 aa, Artificial Sequence
  Synthetic Peptide
PPKVSVFVPPRDGFFGN

SEQ ID NO: 4589 - protein, 17 aa, Artificial Sequence
  Synthetic Peptide
PKVSVFVPPRDGFFGNP

SEQ ID NO: 4590 - protein, 16 aa, Artificial Sequence
  Synthetic Peptide
PLPVIAELPPKVSVFV

SEQ ID NO: 4591 - protein, 16 aa, Artificial Sequence
  Synthetic Peptide
LPVIAELPPKVSVFVP

SEQ ID NO: 4592 - protein, 16 aa, Artificial Sequence
  Synthetic Peptide
PVIAELPPKVSVFVPP

SEQ ID NO: 4593 - protein, 16 aa, Artificial Sequence
  Synthetic Peptide
VIAELPPKVSVFVPPR

SEQ ID NO: 4594 - protein, 16 aa, Artificial Sequence
  Synthetic Peptide
IAELPPKVSVFVPPRD

SEQ ID NO: 4595 - protein, 16 aa, Artificial Sequence
  Synthetic Peptide
AELPPKVSVFVPPRDG

SEQ ID NO: 4596 - protein, 16 aa, Artificial Sequence
  Synthetic Peptide
ELPPKVSVFVPPRDGF

SEQ ID NO: 4597 - protein, 16 aa, Artificial Sequence
  Synthetic Peptide
LPPKVSVFVPPRDGFF

SEQ ID NO: 4598 - protein, 16 aa, Artificial Sequence
  Synthetic Peptide
PPKVSVFVPPRDGFFG

SEQ ID NO: 4599 - protein, 16 aa, Artificial Sequence
  Synthetic Peptide
PKVSVFVPPRDGFFGN

SEQ ID NO: 4600 - protein, 16 aa, Artificial Sequence
  Synthetic Peptide
KVSVFVPPRDGFFGNP

SEQ ID NO: 4601 - protein, 15 aa, Artificial Sequence
  Synthetic Peptide
PLPVIAELPPKVSVF

SEQ ID NO: 4602 - protein, 15 aa, Artificial Sequence
  Synthetic Peptide
LPVIAELPPKVSVFV

SEQ ID NO: 4603 - protein, 15 aa, Artificial Sequence
  Synthetic Peptide
PVIAELPPKVSVFVP

SEQ ID NO: 4604 - protein, 15 aa, Artificial Sequence
  Synthetic Peptide
VIAELPPKVSVFVPP

SEQ ID NO: 4605 - protein, 15 aa, Artificial Sequence
  Synthetic Peptide
IAELPPKVSVFVPPR

SEQ ID NO: 4606 - protein, 15 aa, Artificial Sequence
  Synthetic Peptide
AELPPKVSVFVPPRD

SEQ ID NO: 4607 - protein, 15 aa, Artificial Sequence
  Synthetic Peptide
ELPPKVSVFVPPRDG

SEQ ID NO: 4608 - protein, 15 aa, Artificial Sequence
  Synthetic Peptide
LPPKVSVFVPPRDGF

SEQ ID NO: 4609 - protein, 15 aa, Artificial Sequence
  Synthetic Peptide
PPKVSVFVPPRDGFF

SEQ ID NO: 4610 - protein, 15 aa, Artificial Sequence
  Synthetic Peptide
PKVSVFVPPRDGFFG

SEQ ID NO: 4611 - protein, 15 aa, Artificial Sequence
  Synthetic Peptide
KVSVFVPPRDGFFGN

SEQ ID NO: 4612 - protein, 15 aa, Artificial Sequence
  Synthetic Peptide
VSVFVPPRDGFFGNP

SEQ ID NO: 4613 - protein, 14 aa, Artificial Sequence
  Synthetic Peptide
PLPVIAELPPKVSV

SEQ ID NO: 4614 - protein, 14 aa, Artificial Sequence
  Synthetic Peptide
LPVIAELPPKVSVF

SEQ ID NO: 4615 - protein, 14 aa, Artificial Sequence
  Synthetic Peptide
PVIAELPPKVSVFV

SEQ ID NO: 4616 - protein, 14 aa, Artificial Sequence
  Synthetic Peptide
VIAELPPKVSVFVP

SEQ ID NO: 4617 - protein, 14 aa, Artificial Sequence
  Synthetic Peptide
IAELPPKVSVFVPP

SEQ ID NO: 4618 - protein, 14 aa, Artificial Sequence
  Synthetic Peptide
AELPPKVSVFVPPR

SEQ ID NO: 4619 - protein, 14 aa, Artificial Sequence
  Synthetic Peptide
ELPPKVSVFVPPRD

SEQ ID NO: 4620 - protein, 14 aa, Artificial Sequence
  Synthetic Peptide
LPPKVSVFVPPRDG

SEQ ID NO: 4621 - protein, 14 aa, Artificial Sequence
  Synthetic Peptide
PPKVSVFVPPRDGF

SEQ ID NO: 4622 - protein, 14 aa, Artificial Sequence
  Synthetic Peptide
PKVSVFVPPRDGFF

SEQ ID NO: 4623 - protein, 14 aa, Artificial Sequence
  Synthetic Peptide
KVSVFVPPRDGFFG

SEQ ID NO: 4624 - protein, 14 aa, Artificial Sequence
  Synthetic Peptide
VSVFVPPRDGFFGN

SEQ ID NO: 4625 - protein, 14 aa, Artificial Sequence
  Synthetic Peptide
SVFVPPRDGFFGNP

SEQ ID NO: 4626 - protein, 13 aa, Artificial Sequence
  Synthetic Peptide
PLPVIAELPPKVS

SEQ ID NO: 4627 - protein, 13 aa, Artificial Sequence
  Synthetic Peptide
LPVIAELPPKVSV

SEQ ID NO: 4628 - protein, 13 aa, Artificial Sequence
  Synthetic Peptide
PVIAELPPKVSVF

SEQ ID NO: 4629 - protein, 13 aa, Artificial Sequence
  Synthetic Peptide
VIAELPPKVSVFV

SEQ ID NO: 4630 - protein, 13 aa, Artificial Sequence
  Synthetic Peptide
IAELPPKVSVFVP

SEQ ID NO: 4631 - protein, 13 aa, Artificial Sequence
  Synthetic Peptide
AELPPKVSVFVPP

SEQ ID NO: 4632 - protein, 13 aa, Artificial Sequence
  Synthetic Peptide
ELPPKVSVFVPPR

SEQ ID NO: 4633 - protein, 13 aa, Artificial Sequence
  Synthetic Peptide
LPPKVSVFVPPRD

SEQ ID NO: 4634 - protein, 13 aa, Artificial Sequence
  Synthetic Peptide
PPKVSVFVPPRDG

SEQ ID NO: 4635 - protein, 13 aa, Artificial Sequence
  Synthetic Peptide
PKVSVFVPPRDGF

SEQ ID NO: 4636 - protein, 13 aa, Artificial Sequence
  Synthetic Peptide
KVSVFVPPRDGFF

SEQ ID NO: 4637 - protein, 13 aa, Artificial Sequence
  Synthetic Peptide
VSVFVPPRDGFFG

SEQ ID NO: 4638 - protein, 13 aa, Artificial Sequence
  Synthetic Peptide
SVFVPPRDGFFGN

SEQ ID NO: 4639 - protein, 13 aa, Artificial Sequence
  Synthetic Peptide
VFVPPRDGFFGNP

SEQ ID NO: 4640 - protein, 12 aa, Artificial Sequence
  Synthetic Peptide
PLPVIAELPPKV

SEQ ID NO: 4641 - protein, 12 aa, Artificial Sequence
  Synthetic Peptide
LPVIAELPPKVS

SEQ ID NO: 4642 - protein, 12 aa, Artificial Sequence
  Synthetic Peptide
PVIAELPPKVSV

SEQ ID NO: 4643 - protein, 12 aa, Artificial Sequence
  Synthetic Peptide
VIAELPPKVSVF

SEQ ID NO: 4644 - protein, 12 aa, Artificial Sequence
  Synthetic Peptide
IAELPPKVSVFV

SEQ ID NO: 4645 - protein, 12 aa, Artificial Sequence
  Synthetic Peptide
AELPPKVSVFVP

SEQ ID NO: 4646 - protein, 12 aa, Artificial Sequence
  Synthetic Peptide
ELPPKVSVFVPP

SEQ ID NO: 4647 - protein, 12 aa, Artificial Sequence
  Synthetic Peptide
LPPKVSVFVPPR

SEQ ID NO: 4648 - protein, 12 aa, Artificial Sequence
  Synthetic Peptide
PPKVSVFVPPRD

SEQ ID NO: 4649 - protein, 12 aa, Artificial Sequence
  Synthetic Peptide
PKVSVFVPPRDG

SEQ ID NO: 4650 - protein, 12 aa, Artificial Sequence
  Synthetic Peptide
KVSVFVPPRDGF

SEQ ID NO: 4651 - protein, 12 aa, Artificial Sequence
  Synthetic Peptide
VSVFVPPRDGFF

SEQ ID NO: 4652 - protein, 12 aa, Artificial Sequence
  Synthetic Peptide
SVFVPPRDGFFG

SEQ ID NO: 4653 - protein, 12 aa, Artificial Sequence
  Synthetic Peptide
VFVPPRDGFFGN

SEQ ID NO: 4654 - protein, 12 aa, Artificial Sequence
  Synthetic Peptide
FVPPRDGFFGNP

SEQ ID NO: 4655 - protein, 11 aa, Artificial Sequence
  Synthetic Peptide
PLPVIAELPPK

SEQ ID NO: 4656 - protein, 11 aa, Artificial Sequence
  Synthetic Peptide
LPVIAELPPKV

SEQ ID NO: 4657 - protein, 11 aa, Artificial Sequence
  Synthetic Peptide
PVIAELPPKVS

SEQ ID NO: 4658 - protein, 11 aa, Artificial Sequence
  Synthetic Peptide
VIAELPPKVSV

SEQ ID NO: 4659 - protein, 11 aa, Artificial Sequence
  Synthetic Peptide
IAELPPKVSVF

SEQ ID NO: 4660 - protein, 11 aa, Artificial Sequence
  Synthetic Peptide
AELPPKVSVFV

SEQ ID NO: 4661 - protein, 11 aa, Artificial Sequence
  Synthetic Peptide
ELPPKVSVFVP

SEQ ID NO: 4662 - protein, 11 aa, Artificial Sequence
  Synthetic Peptide
LPPKVSVFVPP

SEQ ID NO: 4663 - protein, 11 aa, Artificial Sequence
  Synthetic Peptide
PPKVSVFVPPR

SEQ ID NO: 4664 - protein, 11 aa, Artificial Sequence
  Synthetic Peptide
PKVSVFVPPRD

SEQ ID NO: 4665 - protein, 11 aa, Artificial Sequence
  Synthetic Peptide
KVSVFVPPRDG

SEQ ID NO: 4666 - protein, 11 aa, Artificial Sequence
  Synthetic Peptide
VSVFVPPRDGF

SEQ ID NO: 4667 - protein, 11 aa, Artificial Sequence
  Synthetic Peptide
SVFVPPRDGFF

SEQ ID NO: 4668 - protein, 11 aa, Artificial Sequence
  Synthetic Peptide
VFVPPRDGFFG

SEQ ID NO: 4669 - protein, 11 aa, Artificial Sequence
  Synthetic Peptide
FVPPRDGFFGN

SEQ ID NO: 4670 - protein, 11 aa, Artificial Sequence
  Synthetic Peptide
VPPRDGFFGNP

SEQ ID NO: 4671 - protein, 10 aa, Artificial Sequence
  Synthetic Peptide
PLPVIAELPP

SEQ ID NO: 4672 - protein, 10 aa, Artificial Sequence
  Synthetic Peptide
LPVIAELPPK

SEQ ID NO: 4673 - protein, 10 aa, Artificial Sequence
  Synthetic Peptide
PVIAELPPKV

SEQ ID NO: 4674 - protein, 10 aa, Artificial Sequence
  Synthetic Peptide
VIAELPPKVS

SEQ ID NO: 4675 - protein, 10 aa, Artificial Sequence
  Synthetic Peptide
IAELPPKVSV

SEQ ID NO: 4676 - protein, 10 aa, Artificial Sequence
  Synthetic Peptide
AELPPKVSVF

SEQ ID NO: 4677 - protein, 10 aa, Artificial Sequence
  Synthetic Peptide
ELPPKVSVFV

SEQ ID NO: 4678 - protein, 10 aa, Artificial Sequence
  Synthetic Peptide
LPPKVSVFVP

SEQ ID NO: 4679 - protein, 10 aa, Artificial Sequence
  Synthetic Peptide
PPKVSVFVPP

SEQ ID NO: 4680 - protein, 10 aa, Artificial Sequence
  Synthetic Peptide
PKVSVFVPPR

SEQ ID NO: 4681 - protein, 10 aa, Artificial Sequence
  Synthetic Peptide
KVSVFVPPRD

SEQ ID NO: 4682 - protein, 10 aa, Artificial Sequence
  Synthetic Peptide
VSVFVPPRDG

SEQ ID NO: 4683 - protein, 10 aa, Artificial Sequence
  Synthetic Peptide
SVFVPPRDGF

SEQ ID NO: 4684 - protein, 10 aa, Artificial Sequence
  Synthetic Peptide
VFVPPRDGFF

SEQ ID NO: 4685 - protein, 10 aa, Artificial Sequence
  Synthetic Peptide
FVPPRDGFFG

SEQ ID NO: 4686 - protein, 10 aa, Artificial Sequence
  Synthetic Peptide
VPPRDGFFGN

SEQ ID NO: 4687 - protein, 10 aa, Artificial Sequence
  Synthetic Peptide
PPRDGFFGNP

SEQ ID NO: 4688 - protein, 9 aa, Artificial Sequence
  Synthetic Peptide
PLPVIAELP

SEQ ID NO: 4689 - protein, 9 aa, Artificial Sequence
  Synthetic Peptide
LPVIAELPP

SEQ ID NO: 4690 - protein, 9 aa, Artificial Sequence
  Synthetic Peptide
PVIAELPPK

SEQ ID NO: 4691 - protein, 9 aa, Artificial Sequence
  Synthetic Peptide
VIAELPPKV

SEQ ID NO: 4692 - protein, 9 aa, Artificial Sequence
  Synthetic Peptide
IAELPPKVS

SEQ ID NO: 4693 - protein, 9 aa, Artificial Sequence
  Synthetic Peptide
AELPPKVSV

SEQ ID NO: 4694 - protein, 9 aa, Artificial Sequence
  Synthetic Peptide
ELPPKVSVF

SEQ ID NO: 4695 - protein, 9 aa, Artificial Sequence
  Synthetic Peptide
LPPKVSVFV

SEQ ID NO: 4696 - protein, 9 aa, Artificial Sequence
  Synthetic Peptide
PPKVSVFVP

SEQ ID NO: 4697 - protein, 9 aa, Artificial Sequence
  Synthetic Peptide
PKVSVFVPP

SEQ ID NO: 4698 - protein, 9 aa, Artificial Sequence
  Synthetic Peptide
KVSVFVPPR

SEQ ID NO: 4699 - protein, 9 aa, Artificial Sequence
  Synthetic Peptide
VSVFVPPRD

SEQ ID NO: 4700 - protein, 9 aa, Artificial Sequence
  Synthetic Peptide
SVFVPPRDG

SEQ ID NO: 4701 - protein, 9 aa, Artificial Sequence
  Synthetic Peptide
VFVPPRDGF

SEQ ID NO: 4702 - protein, 9 aa, Artificial Sequence
  Synthetic Peptide
FVPPRDGFF

SEQ ID NO: 4703 - protein, 9 aa, Artificial Sequence
  Synthetic Peptide
VPPRDGFFG

SEQ ID NO: 4704 - protein, 9 aa, Artificial Sequence
  Synthetic Peptide
PPRDGFFGN

SEQ ID NO: 4705 - protein, 9 aa, Artificial Sequence
  Synthetic Peptide
PRDGFFGNP

SEQ ID NO: 4706 - protein, 8 aa, Artificial Sequence
  Synthetic Peptide
PLPVIAEL

SEQ ID NO: 4707 - protein, 8 aa, Artificial Sequence
  Synthetic Peptide
LPVIAELP

SEQ ID NO: 4708 - protein, 8 aa, Artificial Sequence
  Synthetic Peptide
PVIAELPP

SEQ ID NO: 4709 - protein, 8 aa, Artificial Sequence
  Synthetic Peptide
VIAELPPK

SEQ ID NO: 4710 - protein, 8 aa, Artificial Sequence
  Synthetic Peptide
IAELPPKV

SEQ ID NO: 4711 - protein, 8 aa, Artificial Sequence
  Synthetic Peptide
AELPPKVS

SEQ ID NO: 4712 - protein, 8 aa, Artificial Sequence
  Synthetic Peptide
ELPPKVSV

SEQ ID NO: 4713 - protein, 8 aa, Artificial Sequence
  Synthetic Peptide
LPPKVSVF

SEQ ID NO: 4714 - protein, 8 aa, Artificial Sequence
  Synthetic Peptide
PPKVSVFV

SEQ ID NO: 4715 - protein, 8 aa, Artificial Sequence
  Synthetic Peptide
PKVSVFVP

SEQ ID NO: 4716 - protein, 8 aa, Artificial Sequence
  Synthetic Peptide
KVSVFVPP

SEQ ID NO: 4717 - protein, 8 aa, Artificial Sequence
  Synthetic Peptide
VSVFVPPR

SEQ ID NO: 4718 - protein, 8 aa, Artificial Sequence
  Synthetic Peptide
SVFVPPRD

SEQ ID NO: 4719 - protein, 8 aa, Artificial Sequence
  Synthetic Peptide
VFVPPRDG

SEQ ID NO: 4720 - protein, 8 aa, Artificial Sequence
  Synthetic Peptide
FVPPRDGF

SEQ ID NO: 4721 - protein, 8 aa, Artificial Sequence
  Synthetic Peptide
VPPRDGFF

SEQ ID NO: 4722 - protein, 8 aa, Artificial Sequence
  Synthetic Peptide
PPRDGFFG

SEQ ID NO: 4723 - protein, 8 aa, Artificial Sequence
  Synthetic Peptide
PRDGFFGN

SEQ ID NO: 4724 - protein, 8 aa, Artificial Sequence
  Synthetic Peptide
RDGFFGNP

SEQ ID NO: 4725 - protein, 7 aa, Artificial Sequence
  Synthetic Peptide
PLPVIAE

SEQ ID NO: 4726 - protein, 7 aa, Artificial Sequence
  Synthetic Peptide
LPVIAEL

SEQ ID NO: 4727 - protein, 7 aa, Artificial Sequence
  Synthetic Peptide
PVIAELP

SEQ ID NO: 4728 - protein, 7 aa, Artificial Sequence
  Synthetic Peptide
VIAELPP

SEQ ID NO: 4729 - protein, 7 aa, Artificial Sequence
  Synthetic Peptide
IAELPPK

SEQ ID NO: 4730 - protein, 7 aa, Artificial Sequence
  Synthetic Peptide
AELPPKV

SEQ ID NO: 4731 - protein, 7 aa, Artificial Sequence
  Synthetic Peptide
ELPPKVS

SEQ ID NO: 4732 - protein, 7 aa, Artificial Sequence
  Synthetic Peptide
LPPKVSV

SEQ ID NO: 4733 - protein, 7 aa, Artificial Sequence
  Synthetic Peptide
PPKVSVF

SEQ ID NO: 4734 - protein, 7 aa, Artificial Sequence
  Synthetic Peptide
PKVSVFV

SEQ ID NO: 4735 - protein, 7 aa, Artificial Sequence
  Synthetic Peptide
KVSVFVP

SEQ ID NO: 4736 - protein, 7 aa, Artificial Sequence
  Synthetic Peptide
VSVFVPP

SEQ ID NO: 4737 - protein, 7 aa, Artificial Sequence
  Synthetic Peptide
SVFVPPR

SEQ ID NO: 4738 - protein, 7 aa, Artificial Sequence
  Synthetic Peptide
VFVPPRD

SEQ ID NO: 4739 - protein, 7 aa, Artificial Sequence
  Synthetic Peptide
FVPPRDG

SEQ ID NO: 4740 - protein, 7 aa, Artificial Sequence
  Synthetic Peptide
VPPRDGF

SEQ ID NO: 4741 - protein, 7 aa, Artificial Sequence
  Synthetic Peptide
PPRDGFF

SEQ ID NO: 4742 - protein, 7 aa, Artificial Sequence
  Synthetic Peptide
PRDGFFG

SEQ ID NO: 4743 - protein, 7 aa, Artificial Sequence
  Synthetic Peptide
RDGFFGN

SEQ ID NO: 4744 - protein, 7 aa, Artificial Sequence
  Synthetic Peptide
DGFFGNP

SEQ ID NO: 4745 - protein, 4 aa, Artificial Sequence
  Synthetic Peptide
EKNV

SEQ ID NO: 4746 - protein, 5 aa, Artificial Sequence
  Synthetic Peptide
KEKNV

SEQ ID NO: 4747 - protein, 4 aa, Artificial Sequence
  Synthetic Peptide
RKSK

SEQ ID NO: 4748 - protein, 5 aa, Artificial Sequence
  Synthetic Peptide
RKSKL

SEQ ID NO: 4749 - protein, 5 aa, Artificial Sequence
  Synthetic Peptide
CPRCP

SEQ ID NO: 4750 - protein, 52 aa, Artificial Sequence
  Synthetic Peptide
CPRCPEPKSCDTPPPCPRCPEPKSCDTPPPCPRCPEPKSCDTPPPCPRCPAP

SEQ ID NO: 4751 - protein, 47 aa, Artificial Sequence
  Synthetic Peptide
EPKSCDTPPPCPRCPEPKSCDTPPPCPRCPEPKSCDTPPPCPRCPAP

SEQ ID NO: 4752 - protein, 32 aa, Artificial Sequence
  Synthetic Peptide
EPKSCDTPPPCPRCPEPKSCDTPPPCPRCPAP

SEQ ID NO: 4753 - protein, 22 aa, Artificial Sequence
  Synthetic Peptide
CPRCPEPKSCDTPPPCPRCPAP

SEQ ID NO: 4754 - protein, 17 aa, Artificial Sequence
  Synthetic Peptide
EPKSCDTPPPCPRCPAP

SEQ ID NO: 4755 - protein, 7 aa, Artificial Sequence
  Synthetic Peptide
ELKTPLG

SEQ ID NO: 4756 - protein, 7 aa, Artificial Sequence
  Synthetic Peptide
LKTPLGD

SEQ ID NO: 4757 - protein, 7 aa, Artificial Sequence
  Synthetic Peptide
KTPLGDT

SEQ ID NO: 4758 - protein, 7 aa, Artificial Sequence
  Synthetic Peptide
TPLGDTT

SEQ ID NO: 4759 - protein, 7 aa, Artificial Sequence
  Synthetic Peptide
PLGDTTH

SEQ ID NO: 4760 - protein, 7 aa, Artificial Sequence
  Synthetic Peptide
LGDTTHT

SEQ ID NO: 4761 - protein, 7 aa, Artificial Sequence
  Synthetic Peptide
GDTTHTC

SEQ ID NO: 4762 - protein, 7 aa, Artificial Sequence
  Synthetic Peptide
DTTHTCP

SEQ ID NO: 4763 - protein, 7 aa, Artificial Sequence
  Synthetic Peptide
TTHTCPR

SEQ ID NO: 4764 - protein, 7 aa, Artificial Sequence
  Synthetic Peptide
THTCPRC

SEQ ID NO: 4765 - protein, 7 aa, Artificial Sequence
  Synthetic Peptide
HTCPRCP

SEQ ID NO: 4766 - protein, 7 aa, Artificial Sequence
  Synthetic Peptide
TCPRCPE

SEQ ID NO: 4767 - protein, 7 aa, Artificial Sequence
  Synthetic Peptide
CPRCPEP

SEQ ID NO: 4768 - protein, 7 aa, Artificial Sequence
  Synthetic Peptide
PRCPEPK

SEQ ID NO: 4769 - protein, 7 aa, Artificial Sequence
  Synthetic Peptide
RCPEPKS

SEQ ID NO: 4770 - protein, 7 aa, Artificial Sequence
  Synthetic Peptide
CPEPKSC

SEQ ID NO: 4771 - protein, 7 aa, Artificial Sequence
  Synthetic Peptide
PEPKSCD

SEQ ID NO: 4772 - protein, 7 aa, Artificial Sequence
  Synthetic Peptide
EPKSCDT

SEQ ID NO: 4773 - protein, 7 aa, Artificial Sequence
  Synthetic Peptide
PKSCDTP

SEQ ID NO: 4774 - protein, 7 aa, Artificial Sequence
  Synthetic Peptide
KSCDTPP

SEQ ID NO: 4775 - protein, 7 aa, Artificial Sequence
  Synthetic Peptide
SCDTPPP

SEQ ID NO: 4776 - protein, 7 aa, Artificial Sequence
  Synthetic Peptide
CDTPPPC

SEQ ID NO: 4777 - protein, 7 aa, Artificial Sequence
  Synthetic Peptide
DTPPPCP

SEQ ID NO: 4778 - protein, 7 aa, Artificial Sequence
  Synthetic Peptide
TPPPCPR

SEQ ID NO: 4779 - protein, 7 aa, Artificial Sequence
  Synthetic Peptide
PPPCPRC

SEQ ID NO: 4780 - protein, 7 aa, Artificial Sequence
  Synthetic Peptide
PPCPRCP

SEQ ID NO: 4781 - protein, 7 aa, Artificial Sequence
  Synthetic Peptide
PCPRCPE

SEQ ID NO: 4782 - protein, 7 aa, Artificial Sequence
  Synthetic Peptide
CPRCPEP

SEQ ID NO: 4783 - protein, 7 aa, Artificial Sequence
  Synthetic Peptide
PRCPEPK

SEQ ID NO: 4784 - protein, 7 aa, Artificial Sequence
  Synthetic Peptide
RCPEPKS

SEQ ID NO: 4785 - protein, 7 aa, Artificial Sequence
  Synthetic Peptide
CPEPKSC

SEQ ID NO: 4786 - protein, 7 aa, Artificial Sequence
  Synthetic Peptide
PEPKSCD

SEQ ID NO: 4787 - protein, 7 aa, Artificial Sequence
  Synthetic Peptide
EPKSCDT

SEQ ID NO: 4788 - protein, 7 aa, Artificial Sequence
  Synthetic Peptide
PKSCDTP

SEQ ID NO: 4789 - protein, 7 aa, Artificial Sequence
  Synthetic Peptide
KSCDTPP

SEQ ID NO: 4790 - protein, 7 aa, Artificial Sequence
  Synthetic Peptide
SCDTPPP

SEQ ID NO: 4791 - protein, 7 aa, Artificial Sequence
  Synthetic Peptide
CDTPPPC

SEQ ID NO: 4792 - protein, 7 aa, Artificial Sequence
  Synthetic Peptide
DTPPPCP

SEQ ID NO: 4793 - protein, 7 aa, Artificial Sequence
  Synthetic Peptide
TPPPCPR

SEQ ID NO: 4794 - protein, 7 aa, Artificial Sequence
  Synthetic Peptide
PPPCPRC

SEQ ID NO: 4795 - protein, 7 aa, Artificial Sequence
  Synthetic Peptide
PPCPRCP

SEQ ID NO: 4796 - protein, 7 aa, Artificial Sequence
  Synthetic Peptide
PCPRCPE

SEQ ID NO: 4797 - protein, 7 aa, Artificial Sequence
  Synthetic Peptide
CPRCPEP

SEQ ID NO: 4798 - protein, 7 aa, Artificial Sequence
  Synthetic Peptide
PRCPEPK

SEQ ID NO: 4799 - protein, 7 aa, Artificial Sequence
  Synthetic Peptide
RCPEPKS

SEQ ID NO: 4800 - protein, 7 aa, Artificial Sequence
  Synthetic Peptide
CPEPKSC

SEQ ID NO: 4801 - protein, 7 aa, Artificial Sequence
  Synthetic Peptide
PEPKSCD

SEQ ID NO: 4802 - protein, 7 aa, Artificial Sequence
  Synthetic Peptide
EPKSCDT

SEQ ID NO: 4803 - protein, 7 aa, Artificial Sequence
  Synthetic Peptide
PKSCDTP

SEQ ID NO: 4804 - protein, 7 aa, Artificial Sequence
  Synthetic Peptide
KSCDTPP

SEQ ID NO: 4805 - protein, 7 aa, Artificial Sequence
  Synthetic Peptide
SCDTPPP

SEQ ID NO: 4806 - protein, 7 aa, Artificial Sequence
  Synthetic Peptide
CDTPPPC

SEQ ID NO: 4807 - protein, 7 aa, Artificial Sequence
  Synthetic Peptide
DTPPPCP

SEQ ID NO: 4808 - protein, 7 aa, Artificial Sequence
  Synthetic Peptide
TPPPCPR

SEQ ID NO: 4809 - protein, 7 aa, Artificial Sequence
  Synthetic Peptide
PPPCPRC

SEQ ID NO: 4810 - protein, 7 aa, Artificial Sequence
  Synthetic Peptide
PPCPRCP

SEQ ID NO: 4811 - protein, 64 aa, Artificial Sequence
  Synthetic Peptide
ELKTPLGDTTHTCPRCPEPKSCDTPPPCPRCPEPKSCDTPPPCPRCPEPKSCDTPPPCPRCPAP

SEQ ID NO: 4812 - protein, 18 aa, Artificial Sequence
  Synthetic Peptide
  misc_feature (1)..(18): the entire sequence can be repeated 1 to 10 times
  misc_feature (2)..(2): Wherein Xaa is Leu or Pro
  misc_feature (4)..(4): Wherein Xaa is Thr or Ser
  misc_feature (5)..(5): Wherein Xaa is Pro or Cys
  misc_feature (6)..(6): Wherein Xaa is Leu or none
  misc_feature (7)..(7): Wherein Xaa is Gly or none
  misc_feature (10)..(10): Wherein Xaa is Thr or Pro
  misc_feature (11)..(11): Wherein Xaa is  His or Pro
  misc_feature (12)..(12): Wherein Xaa is  Thr or Pro
  misc_feature (12)..(12): Wherein Xaa is  Thr or Pro
EXKXXXXDTXXXTCPRCP

SEQ ID NO: 4813 - protein, 2 aa, Artificial Sequence
  Synthetic Peptide
  misc_feature (1)..(1): Gly can be repeated 1 to 100 times
  misc_feature (1)..(2): the entire sequence can be repeated 1 to 100 times
GS

SEQ ID NO: 4814 - protein, 2 aa, Artificial Sequence
  Synthetic Peptide
  misc_feature (1)..(1): Gly can be repeated 1 to 100 times
  misc_feature (1)..(2): the entire sequence can be repeated 1 to 50 times
  misc_feature (2)..(2): Ser can be present or absent
GS

SEQ ID NO: 4815 - protein, 1 aa, Artificial Sequence
  Synthetic Peptide
  misc_feature (1)..(1): Gly can be repeated 1 to 100 times
G

SEQ ID NO: 4816 - protein, 2 aa, Artificial Sequence
  Synthetic Peptide
  misc_feature (1)..(2): the entire sequence can be repeated 1 to 100 times
GA

SEQ ID NO: 4817 - protein, 4 aa, Artificial Sequence
  Synthetic Peptide
GGGG

SEQ ID NO: 4818 - protein, 5 aa, Artificial Sequence
  Synthetic Peptide
GGGSG

SEQ ID NO: 4819 - protein, 5 aa, Artificial Sequence
  Synthetic Peptide
  misc_feature (1)..(5): the entire sequence can be repeated 1 to 100 times
GGGSG

SEQ ID NO: 4820 - protein, 5 aa, Artificial Sequence
  Synthetic Peptide
  misc_feature (1)..(5): the entire sequence can be repeated 1 to 100 times
GGGGS

SEQ ID NO: 4821 - protein, 4 aa, Artificial Sequence
  Synthetic Peptide
  misc_feature (1)..(4): the entire sequence can be repeated 1 to 100 times
GGGS

SEQ ID NO: 4822 - protein, 3 aa, Artificial Sequence
  Synthetic Peptide
  misc_Feature (1)..(3): the entire sequence can be repeated 1 to 100 times
GGS

SEQ ID NO: 4823 - protein, 6 aa, Artificial Sequence
  Synthetic Peptide
GSGSGS

SEQ ID NO: 4824 - protein, 5 aa, Artificial Sequence
  Synthetic Peptide
GGSGG

SEQ ID NO: 4825 - protein, 7 aa, Artificial Sequence
  Synthetic Peptide
SGGSGGS

SEQ ID NO: 4826 - protein, 15 aa, Artificial Sequence
  Synthetic Peptide
GGSGGSGGSGGSGGG

SEQ ID NO: 4827 - protein, 16 aa, Artificial Sequence
  Synthetic Peptide
GGSGGSGGGGSGGGGS

SEQ ID NO: 4828 - protein, 18 aa, Artificial Sequence
  Synthetic Peptide
GGSGGSGGSGGSGGSGGS

SEQ ID NO: 4829 - protein, 15 aa, Artificial Sequence
  Synthetic Peptide
GGGGSGGGGSGGGGS

SEQ ID NO: 4830 - protein, 9 aa, Artificial Sequence
  Synthetic Peptide
KPCPPCKCP

SEQ ID NO: 4831 - protein, 11 aa, Artificial Sequence
  Synthetic Peptide
KPCPPCKCPAP

SEQ ID NO: 4832 - protein, 15 aa, Artificial Sequence
  Synthetic Peptide
GPTIKPCPPCKCPAP

SEQ ID NO: 4833 - protein, 64 aa, Artificial Sequence; identical to SEQ ID NO: 4811
  Synthetic Peptide

SEQ ID NO: 4834 - protein, 52 aa, Artificial Sequence; identical to SEQ ID NO: 4750
  Synthetic Peptide

SEQ ID NO: 4835 - protein, 47 aa, Artificial Sequence; identical to SEQ ID NO: 4751
  Synthetic Peptide

SEQ ID NO: 4836 - protein, 32 aa, Artificial Sequence; identical to SEQ ID NO: 4752
  Synthetic Peptide

SEQ ID NO: 4837 - protein, 22 aa, Artificial Sequence
  Synthetic Peptide
CPRCPEPKSCDTPPPCPRCPAP

SEQ ID NO: 4838 - protein, 17 aa, Artificial Sequence
  Synthetic Peptide
EPKSCDTPPPCPRCPAP

SEQ ID NO: 4839 - protein, 17 aa, Artificial Sequence
  Synthetic Peptide
EPKSCDKTHTCPPCPAP

SEQ ID NO: 4840 - protein, 16 aa, Artificial Sequence
  Synthetic Peptide
PKSCDKTHTCPPCPAP

SEQ ID NO: 4841 - protein, 8 aa, Artificial Sequence
  Synthetic Peptide
PCPRCPAP

SEQ ID NO: 4842 - protein, 11 aa, Artificial Sequence
  Synthetic Peptide
PCPAPPVAGPS

SEQ ID NO: 4843 - protein, 7 aa, Artificial Sequence
  Synthetic Peptide
PPKPKDT

SEQ ID NO: 4844 - protein, 28 aa, Artificial Sequence
  Synthetic Peptide
TVPCPVPSTPPTPSPSTPPTPSPSCCHP

SEQ ID NO: 4845 - protein, 10 aa, Artificial Sequence
  Synthetic Peptide
TVPCPVPSTP

SEQ ID NO: 4846 - protein, 10 aa, Artificial Sequence
  Synthetic Peptide
TPSPSTPPTP

SEQ ID NO: 4847 - protein, 9 aa, Artificial Sequence
  Synthetic Peptide
TPSPSCCHP

SEQ ID NO: 4848 - protein, 15 aa, Artificial Sequence
  Synthetic Peptide
VPCPVPPPPPCCHPR

SEQ ID NO: 4849 - protein, 7 aa, Artificial Sequence
  Synthetic Peptide
VPCPVPP

SEQ ID NO: 4850 - protein, 7 aa, Artificial Sequence
  Synthetic Peptide
PPPCCHP

SEQ ID NO: 4851 - protein, 13 aa, Artificial Sequence
  Synthetic Peptide
PCPVPPPPPCCHP

SEQ ID NO: 4852 - protein, 77 aa, Artificial Sequence; identical to SEQ ID NO: 1
  Synthetic Peptide

SEQ ID NO: 4853 - protein, 19 aa, Artificial Sequence
  Synthetic Peptide
KTPECPSHTQPLGVYLLTP

SEQ ID NO: 4854 - protein, 17 aa, Artificial Sequence
  Synthetic Peptide
PECPSHTQPLGVYLLTP

SEQ ID NO: 4855 - protein, 14 aa, Artificial Sequence
  Synthetic Peptide
RWPESPKAQASSVP

SEQ ID NO: 4856 - protein, 10 aa, Artificial Sequence
  Synthetic Peptide
SVCSRDFTPP

SEQ ID NO: 4857 - protein, 26 aa, Artificial Sequence
  Synthetic Peptide
PLPVIAELPPKVSVFVPPRDGFFGNP

SEQ ID NO: 4858 - protein, 10 aa, Artificial Sequence
  Synthetic Peptide
PLPVIAELPP

SEQ ID NO: 4859 - protein, 12 aa, Artificial Sequence
  Synthetic Peptide
ELPPKVSVFVPP

SEQ ID NO: 4860 - protein, 13 aa, Artificial Sequence
  Synthetic Peptide
EPRGPTIKPCPPC

SEQ ID NO: 4861 - protein, 5 aa, Artificial Sequence
  Synthetic Peptide
VDKKI

SEQ ID NO: 4862 - protein, 5 aa, Artificial Sequence
  Synthetic Peptide
KCPAP

SEQ ID NO: 4863 - protein, 6 aa, Artificial Sequence
  Synthetic Peptide
KPCPPC

SEQ ID NO: 4864 - protein, 839 aa, Artificial Sequence
  Synthetic Peptide
MLLLVTSLLLCELPHPAFLLIPDIQMTQTTSSLSASLGDRVTISCRASQDISKYLNWYQQKPDGTVKLLIYHTSRLHSGVPSRFSGSGSGTDYSLTISNLEQEDIATYFCQQGNTLPYTFGGGTKLEITGSTSGSGKPGSGEGSTKGEVKLQESGPGLVAPSQSLSVTCTVSGVSLPDYGVSWIRQPPRKGLEWLGVIWGSETTYYNSALKSRLTIIKDNSKSQVFLKMNSLQTDDTAIYYCAKHYYYGGSYAMDYWGQGTSVTVSSESKYGPPCPPCPMFWVLVVVGGVLACYSLLVTVAFIIFWVKRGRKKLLYIFKQPFMRPVQTTQEEDGCSCRFPEEEEGGCELRVKFSRSADAPAYQQGQNQLYNELNLGRREEYDVLDKRRGRDPEMGGKPRRKNPQEGLYNELQKDKMAEAYSEIGMKGERRRGKGHDGLYQGLSTATKDTYDALHMQALPPRSGATNFSLLKQAGDVEENPGPMLLLVTSLLLCELPHPAFLLIPRKVCNGIGIGEFKDSLSINATNIKHFKNCTSISGDLHILPVAFRGDSFTHTPPLDPQELDILKTVKEITGFLLIQAWPENRTDLHAFENLEIIRGRTKQHGQFSLAVVSLNITSLGLRSLKEISDGDVIISGNKNLCYANTINWKKLFGTSGQKTKIISNRGENSCKATGQVCHALCSPEGCWGPEPRDCVSCRNVSRGRECVDKCNLLEGEPREFVENSECIQCHPECLPQAMNITCTGRGPDNCIQCAHYIDGPHCVKTCPAGVMGENNTLVWKYADAGHVCHLCHPNCTYGCTGPGLEGCPTNGPKIPSIATGMVGALLLLLVVALGIGLFM

SEQ ID NO: 4865 - protein, 22 aa, Artificial Sequence
  Synthetic Peptide
MLLLVTSLLLCELPHPAFLLIP

SEQ ID NO: 4866 - protein, 245 aa, Artificial Sequence
  Synthetic Peptide
DIQMTQTTSSLSASLGDRVTISCRASQDISKYLNWYQQKPDGTVKLLIYHTSRLHSGVPSRFSGSGSGTDYSLTISNLEQEDIATYFCQQGNTLPYTFGGGTKLEITGSTSGSGKPGSGEGSTKGEVKLQESGPGLVAPSQSLSVTCTVSGVSLPDYGVSWIRQPPRKGLEWLGVIWGSETTYYNSALKSRLTIIKDNSKSQVFLKMNSLQTDDTAIYYCAKHYYYGGSYAMDYWGQGTSVTVSS

SEQ ID NO: 4867 - protein, 12 aa, Artificial Sequence
  Synthetic Peptide
ESKYGPPCPPCP

SEQ ID NO: 4868 - protein, 28 aa, Artificial Sequence
  Synthetic Peptide
MFWVLVVVGGVLACYSLLVTVAFIIFWV

SEQ ID NO: 4869 - protein, 42 aa, Artificial Sequence
  Synthetic Peptide
KRGRKKLLYIFKQPFMRPVQTTQEEDGCSCRFPEEEEGGCEL

SEQ ID NO: 4870 - protein, 112 aa, Artificial Sequence
  Synthetic Peptide
RVKFSRSADAPAYQQGQNQLYNELNLGRREEYDVLDKRRGRDPEMGGKPRRKNPQEGLYNELQKDKMAEAYSEIGMKGERRRGKGHDGLYQGLSTATKDTYDALHMQALPPR

SEQ ID NO: 4871 - protein, 21 aa, Artificial Sequence
  Synthetic Peptide
SGATNFSLLKQAGDVEENPGP

SEQ ID NO: 4872 - protein, 357 aa, Artificial Sequence
  Synthetic Peptide
MLLLVTSLLLCELPHPAFLLIPRKVCNGIGIGEFKDSLSINATNIKHFKNCTSISGDLHILPVAFRGDSFTHTPPLDPQELDILKTVKEITGFLLIQAWPENRTDLHAFENLEIIRGRTKQHGQFSLAVVSLNITSLGLRSLKEISDGDVIISGNKNLCYANTINWKKLFGTSGQKTKIISNRGENSCKATGQVCHALCSPEGCWGPEPRDCVSCRNVSRGRECVDKCNLLEGEPREFVENSECIQCHPECLPQAMNITCTGRGPDNCIQCAHYIDGPHCVKTCPAGVMGENNTLVWKYADAGHVCHLCHPNCTYGCTGPGLEGCPTNGPKIPSIATGMVGALLLLLVVALGIGLFM

SEQ ID NO: 4873 - protein, 840 aa, Artificial Sequence
  Synthetic Peptide
MVLQTQVFISLLLWISGAYGQEQLVESGGRLVTPGGSLTLSCKASGFDFSAYYMSWVRQAPGKGLEWIATIYPSSGKTYYATWVNGRFTISSDNAQNTVDLQMNSLTAADRATYFCARDSYADDGALFNIWGPGTLVTISSGGGGSGGGGSGGGGSELVLTQSPSVSAALGSPAKITCTLSSAHKTDTIDWYQQLQGEAPRYLMQVQSDGSYTKRPGVPDRFSGSSSGADRYLIIPSVQADDEADYYCGADYIGGYVFGGGTQLTVTGESKYGPPCPPCPMFWVLVVVGGVLACYSLLVTVAFIIFWVKRGRKKLLYIFKQPFMRPVQTTQEEDGCSCRFPEEEEGGCELRVKFSRSADAPAYQQGQNQLYNELNLGRREEYDVLDKRRGRDPEMGGKPRRKNPQEGLYNELQKDKMAEAYSEIGMKGERRRGKGHDGLYQGLSTATKDTYDALHMQALPPRSGATNFSLLKQAGDVEENPGPMLLLVTSLLLCELPHPAFLLIPRKVCNGIGIGEFKDSLSINATNIKHFKNCTSISGDLHILPVAFRGDSFTHTPPLDPQELDILKTVKEITGFLLIQAWPENRTDLHAFENLEIIRGRTKQHGQFSLAVVSLNITSLGLRSLKEISDGDVIISGNKNLCYANTINWKKLFGTSGQKTKIISNRGENSCKATGQVCHALCSPEGCWGPEPRDCVSCRNVSRGRECVDKCNLLEGEPREFVENSECIQCHPECLPQAMNITCTGRGPDNCIQCAHYIDGPHCVKTCPAGVMGENNTLVWKYADAGHVCHLCHPNCTYGCTGPGLEGCPTNGPKIPSIATGMVGALLLLLVVALGIGLFM

SEQ ID NO: 4874 - protein, 20 aa, Artificial Sequence
  Synthetic Peptide
MVLQTQVFISLLLWISGAYG

SEQ ID NO: 4875 - protein, 248 aa, Artificial Sequence
  Synthetic Peptide
QEQLVESGGRLVTPGGSLTLSCKASGFDFSAYYMSWVRQAPGKGLEWIATIYPSSGKTYYATWVNGRFTISSDNAQNTVDLQMNSLTAADRATYFCARDSYADDGALFNIWGPGTLVTISSGGGGSGGGGSGGGGSELVLTQSPSVSAALGSPAKITCTLSSAHKTDTIDWYQQLQGEAPRYLMQVQSDGSYTKRPGVPDRFSGSSSGADRYLIIPSVQADDEADYYCGADYIGGYVFGGGTQLTVTG

SEQ ID NO: 4876 - protein, 12 aa, Artificial Sequence
  Synthetic Peptide
ESKYGPPCPPCP

SEQ ID NO: 4877 - protein, 28 aa, Artificial Sequence
  Synthetic Peptide
MFWVLVVVGGVLACYSLLVTVAFIIFWV

SEQ ID NO: 4878 - protein, 42 aa, Artificial Sequence; identical to SEQ ID NO: 4869
  Synthetic Peptide

SEQ ID NO: 4879 - protein, 112 aa, Artificial Sequence; identical to SEQ ID NO: 4870
  Synthetic Peptide

SEQ ID NO: 4880 - protein, 21 aa, Artificial Sequence
  Synthetic Peptide
SGATNFSLLKQAGDVEENPGP

SEQ ID NO: 4881 - protein, 357 aa, Artificial Sequence; identical to SEQ ID NO: 4872
  Synthetic Peptide

SEQ ID NO: 4882 - protein, 14 aa, Artificial Sequence
  Synthetic Peptide
KPCPPCKCPGGGSG

SEQ ID NO: 4883 - protein, 14 aa, Artificial Sequence
  Synthetic Peptide
GGGSGKPCPPCKCP

SEQ ID NO: 4884 - protein, 19 aa, Artificial Sequence
  Synthetic Peptide
GGGSGKPCPPCKCPGGGSG

SEQ ID NO: 4885 - protein, 18 aa, Artificial Sequence
  Synthetic Peptide
GSTSGSGKPGSGEGSTKG

SEQ ID NO: 4886 - protein, 15 aa, Artificial Sequence
  Synthetic Peptide
GSTSGSGKPGSGEGS

SEQ ID NO: 4887 - protein, 116 aa, Artificial Sequence
  Synthetic Peptide
QSVKESEGDLVTPAGNLTLTCTASGSDINDYPISWVRQAPGKGLEWIGFINSGGSTWYASWVKGRFTISRTSTTVDLKMTSLTTDDTATYFCARGYSTYYCDFNIWGPGTLVTISS

SEQ ID NO: 4888 - protein, 5 aa, Artificial Sequence
  Synthetic Peptide
DYPIS

SEQ ID NO: 4889 - protein, 16 aa, Artificial Sequence
  Synthetic Peptide
FINSGGSTWYASWVKG

SEQ ID NO: 4890 - protein, 11 aa, Artificial Sequence
  Synthetic Peptide
GYSTYYCDFNI

SEQ ID NO: 4891 - protein, 110 aa, Artificial Sequence
  Synthetic Peptide
ELVMTQTPSSTSGAVGGTVTINCQASQSIDSNLAWFQQKPGQPPTLLIYRASNLASGVPSRFSGSRSGTEYTLTISGVQREDAATYYCLGGVGNVSYRTSFGGGTEVVVK

SEQ ID NO: 4892 - protein, 11 aa, Artificial Sequence
  Synthetic Peptide
QASQSIDSNLA

SEQ ID NO: 4893 - protein, 7 aa, Artificial Sequence
  Synthetic Peptide
RASNLAS

SEQ ID NO: 4894 - protein, 12 aa, Artificial Sequence
  Synthetic Peptide
LGGVGNVSYRTS

SEQ ID NO: 4895 - protein, 121 aa, Artificial Sequence
  Synthetic Peptide
QEQLVESGGRLVTPGGSLTLSCKASGFDFSAYYMSWVRQAPGKGLEWIATIYPSSGKTYYATWVNGRFTISSDNAQNTVDLQMNSLTAADRATYFCARDSYADDGALFNIWGPGTLVTISS

SEQ ID NO: 4896 - protein, 5 aa, Artificial Sequence
  Synthetic Peptide
AYYMS

SEQ ID NO: 4897 - protein, 17 aa, Artificial Sequence
  Synthetic Peptide
TIYPSSGKTYYATWVNG

SEQ ID NO: 4898 - protein, 12 aa, Artificial Sequence
  Synthetic Peptide
DSYADDGALFNI

SEQ ID NO: 4899 - protein, 112 aa, Artificial Sequence
  Synthetic Peptide
ELVLTQSPSVSAALGSPAKITCTLSSAHKTDTIDWYQQLQGEAPRYLMQVQSDGSYTKRPGVPDRFSGSSSGADRYLIIPSVQADDEADYYCGADYIGGYVFGGGTQLTVTG

SEQ ID NO: 4900 - protein, 12 aa, Artificial Sequence
  Synthetic Peptide
TLSSAHKTDTID

SEQ ID NO: 4901 - protein, 7 aa, Artificial Sequence
  Synthetic Peptide
GSYTKRP

SEQ ID NO: 4902 - protein, 9 aa, Artificial Sequence
  Synthetic Peptide
GADYIGGYV

SEQ ID NO: 4903 - protein, 118 aa, Artificial Sequence
  Synthetic Peptide
QVQLQQSGAELVRPGASVTLSCKASGYTFSDYEMHWVIQTPVHGLEWIGAIDPETGGTAYNQKFKGKAILTADKSSSTAYMELRSLTSEDSAVYYCTGYYDYDSFTYWGQGTLVTVSA

SEQ ID NO: 4904 - protein, 5 aa, Artificial Sequence
  Synthetic Peptide
DYEMH

SEQ ID NO: 4905 - protein, 17 aa, Artificial Sequence
  Synthetic Peptide
AIDPETGGTAYNQKFKG

SEQ ID NO: 4906 - protein, 9 aa, Artificial Sequence
  Synthetic Peptide
YYDYDSFTY

SEQ ID NO: 4907 - protein, 107 aa, Artificial Sequence
  Synthetic Peptide
DIVMTQSQKIMSTTVGDRVSITCKASQNVDAAVAWYQQKPGQSPKLLIYSASNRYTGVPDRFTGSGSGTDFTLTISNMQSEDLADYFCQQYDIYPYTFGGGTKLEIK

SEQ ID NO: 4908 - protein, 11 aa, Artificial Sequence
  Synthetic Peptide
KASQNVDAAVA

SEQ ID NO: 4909 - protein, 7 aa, Artificial Sequence
  Synthetic Peptide
SASNRYT

SEQ ID NO: 4910 - protein, 9 aa, Artificial Sequence
  Synthetic Peptide
QQYDIYPYT

SEQ ID NO: 4911 - protein, 12 aa, Artificial Sequence
  Synthetic Peptide
ESKYGPPCPPCP

SEQ ID NO: 4912 - protein, 119 aa, Artificial Sequence
  Synthetic Peptide
ESKYGPPCPPCPGQPREPQVYTLPPSQEEMTKNQVSLTCLVKGFYPSDIAVEWESNGQPENNYKTTPPVLDSDGSFFLYSRLTVDKSRWQEGNVFSCSVMHEALHNHYTQKSLSLSLGK

SEQ ID NO: 4913 - protein, 228 aa, Artificial Sequence
  Synthetic Peptide
ESKYGPPCPPCPAPPVAGPSVFLFPPKPKDTLMISRTPEVTCVVVDVSQEDPEVQFNWYVDGVEVHNAKTKPREEQFQSTYRVVSVLTVLHQDWLNGKEYKCKVSNKGLPSSIEKTISKAKGQPREPQVYTLPPSQEEMTKNQVSLTCLVKGFYPSDIAVEWESNGQPENNYKTTPPVLDSDGSFFLYSRLTVDKSRWQEGNVFSCSVMHEALHNHYTQKSLSLSLGK

SEQ ID NO: 4914 - protein, 836 aa, Artificial Sequence
  Synthetic Peptide
MLLLVTSLLLCELPHPAFLLIPDIQMTQTTSSLSASLGDRVTISCRASQDISKYLNWYQQKPDGTVKLLIYHTSRLHSGVPSRFSGSGSGTDYSLTISNLEQEDIATYFCQQGNTLPYTFGGGTKLEITGSTSGSGKPGSGEGSTKGEVKLQESGPGLVAPSQSLSVTCTVSGVSLPDYGVSWIRQPPRKGLEWLGVIWGSETTYYNSALKSRLTIIKDNSKSQVFLKMNSLQTDDTAIYYCAKHYYYGGSYAMDYWGQGTSVTVSSKPCPPCKCPMFWVLVVVGGVLACYSLLVTVAFIIFWVKRGRKKLLYIFKQPFMRPVQTTQEEDGCSCRFPEEEEGGCELRVKFSRSADAPAYQQGQNQLYNELNLGRREEYDVLDKRRGRDPEMGGKPRRKNPQEGLYNELQKDKMAEAYSEIGMKGERRRGKGHDGLYQGLSTATKDTYDALHMQALPPRSGATNFSLLKQAGDVEENPGPMLLLVTSLLLCELPHPAFLLIPRKVCNGIGIGEFKDSLSINATNIKHFKNCTSISGDLHILPVAFRGDSFTHTPPLDPQELDILKTVKEITGFLLIQAWPENRTDLHAFENLEIIRGRTKQHGQFSLAVVSLNITSLGLRSLKEISDGDVIISGNKNLCYANTINWKKLFGTSGQKTKIISNRGENSCKATGQVCHALCSPEGCWGPEPRDCVSCRNVSRGRECVDKCNLLEGEPREFVENSECIQCHPECLPQAMNITCTGRGPDNCIQCAHYIDGPHCVKTCPAGVMGENNTLVWKYADAGHVCHLCHPNCTYGCTGPGLEGCPTNGPKIPSIATGMVGALLLLLVVALGIGLFM

SEQ ID NO: 4915 - protein, 843 aa, Artificial Sequence
  Synthetic Peptide
MLLLVTSLLLCELPHPAFLLIPDIQMTQTTSSLSASLGDRVTISCRASQDISKYLNWYQQKPDGTVKLLIYHTSRLHSGVPSRFSGSGSGTDYSLTISNLEQEDIATYFCQQGNTLPYTFGGGTKLEITGSTSGSGKPGSGEGSTKGEVKLQESGPGLVAPSQSLSVTCTVSGVSLPDYGVSWIRQPPRKGLEWLGVIWGSETTYYNSALKSRLTIIKDNSKSQVFLKMNSLQTDDTAIYYCAKHYYYGGSYAMDYWGQGTSVTVSSPKSCDKTHTCPPCPAPMFWVLVVVGGVLACYSLLVTVAFIIFWVKRGRKKLLYIFKQPFMRPVQTTQEEDGCSCRFPEEEEGGCELRVKFSRSADAPAYQQGQNQLYNELNLGRREEYDVLDKRRGRDPEMGGKPRRKNPQEGLYNELQKDKMAEAYSEIGMKGERRRGKGHDGLYQGLSTATKDTYDALHMQALPPRSGATNFSLLKQAGDVEENPGPMLLLVTSLLLCELPHPAFLLIPRKVCNGIGIGEFKDSLSINATNIKHFKNCTSISGDLHILPVAFRGDSFTHTPPLDPQELDILKTVKEITGFLLIQAWPENRTDLHAFENLEIIRGRTKQHGQFSLAVVSLNITSLGLRSLKEISDGDVIISGNKNLCYANTINWKKLFGTSGQKTKIISNRGENSCKATGQVCHALCSPEGCWGPEPRDCVSCRNVSRGRECVDKCNLLEGEPREFVENSECIQCHPECLPQAMNITCTGRGPDNCIQCAHYIDGPHCVKTCPAGVMGENNTLVWKYADAGHVCHLCHPNCTYGCTGPGLEGCPTNGPKIPSIATGMVGALLLLLVVALGIGLFM

SEQ ID NO: 4916 - protein, 835 aa, Artificial Sequence
  Synthetic Peptide
MLLLVTSLLLCELPHPAFLLIPDIQMTQTTSSLSASLGDRVTISCRASQDISKYLNWYQQKPDGTVKLLIYHTSRLHSGVPSRFSGSGSGTDYSLTISNLEQEDIATYFCQQGNTLPYTFGGGTKLEITGSTSGSGKPGSGEGSTKGEVKLQESGPGLVAPSQSLSVTCTVSGVSLPDYGVSWIRQPPRKGLEWLGVIWGSETTYYNSALKSRLTIIKDNSKSQVFLKMNSLQTDDTAIYYCAKHYYYGGSYAMDYWGQGTSVTVSSPCPRCPAPMFWVLVVVGGVLACYSLLVTVAFIIFWVKRGRKKLLYIFKQPFMRPVQTTQEEDGCSCRFPEEEEGGCELRVKFSRSADAPAYQQGQNQLYNELNLGRREEYDVLDKRRGRDPEMGGKPRRKNPQEGLYNELQKDKMAEAYSEIGMKGERRRGKGHDGLYQGLSTATKDTYDALHMQALPPRSGATNFSLLKQAGDVEENPGPMLLLVTSLLLCELPHPAFLLIPRKVCNGIGIGEFKDSLSINATNIKHFKNCTSISGDLHILPVAFRGDSFTHTPPLDPQELDILKTVKEITGFLLIQAWPENRTDLHAFENLEIIRGRTKQHGQFSLAVVSLNITSLGLRSLKEISDGDVIISGNKNLCYANTINWKKLFGTSGQKTKIISNRGENSCKATGQVCHALCSPEGCWGPEPRDCVSCRNVSRGRECVDKCNLLEGEPREFVENSECIQCHPECLPQAMNITCTGRGPDNCIQCAHYIDGPHCVKTCPAGVMGENNTLVWKYADAGHVCHLCHPNCTYGCTGPGLEGCPTNGPKIPSIATGMVGALLLLLVVALGIGLFM

SEQ ID NO: 4917 - protein, 838 aa, Artificial Sequence
  Synthetic Peptide
MLLLVTSLLLCELPHPAFLLIPDIQMTQTTSSLSASLGDRVTISCRASQDISKYLNWYQQKPDGTVKLLIYHTSRLHSGVPSRFSGSGSGTDYSLTISNLEQEDIATYFCQQGNTLPYTFGGGTKLEITGSTSGSGKPGSGEGSTKGEVKLQESGPGLVAPSQSLSVTCTVSGVSLPDYGVSWIRQPPRKGLEWLGVIWGSETTYYNSALKSRLTIIKDNSKSQVFLKMNSLQTDDTAIYYCAKHYYYGGSYAMDYWGQGTSVTVSSPCPAPPVAGPSMFWVLVVVGGVLACYSLLVTVAFIIFWVKRGRKKLLYIFKQPFMRPVQTTQEEDGCSCRFPEEEEGGCELRVKFSRSADAPAYQQGQNQLYNELNLGRREEYDVLDKRRGRDPEMGGKPRRKNPQEGLYNELQKDKMAEAYSEIGMKGERRRGKGHDGLYQGLSTATKDTYDALHMQALPPRSGATNFSLLKQAGDVEENPGPMLLLVTSLLLCELPHPAFLLIPRKVCNGIGIGEFKDSLSINATNIKHFKNCTSISGDLHILPVAFRGDSFTHTPPLDPQELDILKTVKEITGFLLIQAWPENRTDLHAFENLEIIRGRTKQHGQFSLAVVSLNITSLGLRSLKEISDGDVIISGNKNLCYANTINWKKLFGTSGQKTKIISNRGENSCKATGQVCHALCSPEGCWGPEPRDCVSCRNVSRGRECVDKCNLLEGEPREFVENSECIQCHPECLPQAMNITCTGRGPDNCIQCAHYIDGPHCVKTCPAGVMGENNTLVWKYADAGHVCHLCHPNCTYGCTGPGLEGCPTNGPKIPSIATGMVGALLLLLVVALGIGLFM

SEQ ID NO: 4918 - protein, 860 aa, Artificial Sequence
  Synthetic Peptide
MVLQTQVFISLLLWISGAYGQEQLVESGGRLVTPGGSLTLSCKASGFDFSAYYMSWVRQAPGKGLEWIATIYPSSGKTYYATWVNGRFTISSDNAQNTVDLQMNSLTAADRATYFCARDSYADDGALFNIWGPGTLVTISSGGGGSGGGGSGGGGSELVLTQSPSVSAALGSPAKITCTLSSAHKTDTIDWYQQLQGEAPRYLMQVQSDGSYTKRPGVPDRFSGSSSGADRYLIIPSVQADDEADYYCGADYIGGYVFGGGTQLTVTGEPKSCDTPPPCPRCPEPKSCDTPPPCPRCPAPMFWVLVVVGGVLACYSLLVTVAFIIFWVKRGRKKLLYIFKQPFMRPVQTTQEEDGCSCRFPEEEEGGCELRVKFSRSADAPAYQQGQNQLYNELNLGRREEYDVLDKRRGRDPEMGGKPRRKNPQEGLYNELQKDKMAEAYSEIGMKGERRRGKGHDGLYQGLSTATKDTYDALHMQALPPRSGATNFSLLKQAGDVEENPGPMLLLVTSLLLCELPHPAFLLIPRKVCNGIGIGEFKDSLSINATNIKHFKNCTSISGDLHILPVAFRGDSFTHTPPLDPQELDILKTVKEITGFLLIQAWPENRTDLHAFENLEIIRGRTKQHGQFSLAVVSLNITSLGLRSLKEISDGDVIISGNKNLCYANTINWKKLFGTSGQKTKIISNRGENSCKATGQVCHALCSPEGCWGPEPRDCVSCRNVSRGRECVDKCNLLEGEPREFVENSECIQCHPECLPQAMNITCTGRGPDNCIQCAHYIDGPHCVKTCPAGVMGENNTLVWKYADAGHVCHLCHPNCTYGCTGPGLEGCPTNGPKIPSIATGMVGALLLLLVVALGIGLFM

SEQ ID NO: 4919 - protein, 850 aa, Artificial Sequence
  Synthetic Peptide
MVLQTQVFISLLLWISGAYGQEQLVESGGRLVTPGGSLTLSCKASGFDFSAYYMSWVRQAPGKGLEWIATIYPSSGKTYYATWVNGRFTISSDNAQNTVDLQMNSLTAADRATYFCARDSYADDGALFNIWGPGTLVTISSGGGGSGGGGSGGGGSELVLTQSPSVSAALGSPAKITCTLSSAHKTDTIDWYQQLQGEAPRYLMQVQSDGSYTKRPGVPDRFSGSSSGADRYLIIPSVQADDEADYYCGADYIGGYVFGGGTQLTVTGCPRCPEPKSCDTPPPCPRCPAPMFWVLVVVGGVLACYSLLVTVAFIIFWVKRGRKKLLYIFKQPFMRPVQTTQEEDGCSCRFPEEEEGGCELRVKFSRSADAPAYQQGQNQLYNELNLGRREEYDVLDKRRGRDPEMGGKPRRKNPQEGLYNELQKDKMAEAYSEIGMKGERRRGKGHDGLYQGLSTATKDTYDALHMQALPPRSGATNFSLLKQAGDVEENPGPMLLLVTSLLLCELPHPAFLLIPRKVCNGIGIGEFKDSLSINATNIKHFKNCTSISGDLHILPVAFRGDSFTHTPPLDPQELDILKTVKEITGFLLIQAWPENRTDLHAFENLEIIRGRTKQHGQFSLAVVSLNITSLGLRSLKEISDGDVIISGNKNLCYANTINWKKLFGTSGQKTKIISNRGENSCKATGQVCHALCSPEGCWGPEPRDCVSCRNVSRGRECVDKCNLLEGEPREFVENSECIQCHPECLPQAMNITCTGRGPDNCIQCAHYIDGPHCVKTCPAGVMGENNTLVWKYADAGHVCHLCHPNCTYGCTGPGLEGCPTNGPKIPSIATGMVGALLLLLVVALGIGLFM

SEQ ID NO: 4920 - protein, 845 aa, Artificial Sequence
  Synthetic Peptide
MVLQTQVFISLLLWISGAYGQEQLVESGGRLVTPGGSLTLSCKASGFDFSAYYMSWVRQAPGKGLEWIATIYPSSGKTYYATWVNGRFTISSDNAQNTVDLQMNSLTAADRATYFCARDSYADDGALFNIWGPGTLVTISSGGGGSGGGGSGGGGSELVLTQSPSVSAALGSPAKITCTLSSAHKTDTIDWYQQLQGEAPRYLMQVQSDGSYTKRPGVPDRFSGSSSGADRYLIIPSVQADDEADYYCGADYIGGYVFGGGTQLTVTGEPKSCDTPPPCPRCPAPMFWVLVVVGGVLACYSLLVTVAFIIFWVKRGRKKLLYIFKQPFMRPVQTTQEEDGCSCRFPEEEEGGCELRVKFSRSADAPAYQQGQNQLYNELNLGRREEYDVLDKRRGRDPEMGGKPRRKNPQEGLYNELQKDKMAEAYSEIGMKGERRRGKGHDGLYQGLSTATKDTYDALHMQALPPRSGATNFSLLKQAGDVEENPGPMLLLVTSLLLCELPHPAFLLIPRKVCNGIGIGEFKDSLSINATNIKHFKNCTSISGDLHILPVAFRGDSFTHTPPLDPQELDILKTVKEITGFLLIQAWPENRTDLHAFENLEIIRGRTKQHGQFSLAVVSLNITSLGLRSLKEISDGDVIISGNKNLCYANTINWKKLFGTSGQKTKIISNRGENSCKATGQVCHALCSPEGCWGPEPRDCVSCRNVSRGRECVDKCNLLEGEPREFVENSECIQCHPECLPQAMNITCTGRGPDNCIQCAHYIDGPHCVKTCPAGVMGENNTLVWKYADAGHVCHLCHPNCTYGCTGPGLEGCPTNGPKIPSIATGMVGALLLLLVVALGIGLFM

SEQ ID NO: 4921 - protein, 845 aa, Artificial Sequence
  Synthetic Peptide
MVLQTQVFISLLLWISGAYGQEQLVESGGRLVTPGGSLTLSCKASGFDFSAYYMSWVRQAPGKGLEWIATIYPSSGKTYYATWVNGRFTISSDNAQNTVDLQMNSLTAADRATYFCARDSYADDGALFNIWGPGTLVTISSGGGGSGGGGSGGGGSELVLTQSPSVSAALGSPAKITCTLSSAHKTDTIDWYQQLQGEAPRYLMQVQSDGSYTKRPGVPDRFSGSSSGADRYLIIPSVQADDEADYYCGADYIGGYVFGGGTQLTVTGEPKSCDKTHTCPPCPAPMFWVLVVVGGVLACYSLLVTVAFIIFWVKRGRKKLLYIFKQPFMRPVQTTQEEDGCSCRFPEEEEGGCELRVKFSRSADAPAYQQGQNQLYNELNLGRREEYDVLDKRRGRDPEMGGKPRRKNPQEGLYNELQKDKMAEAYSEIGMKGERRRGKGHDGLYQGLSTATKDTYDALHMQALPPRSGATNFSLLKQAGDVEENPGPMLLLVTSLLLCELPHPAFLLIPRKVCNGIGIGEFKDSLSINATNIKHFKNCTSISGDLHILPVAFRGDSFTHTPPLDPQELDILKTVKEITGFLLIQAWPENRTDLHAFENLEIIRGRTKQHGQFSLAVVSLNITSLGLRSLKEISDGDVIISGNKNLCYANTINWKKLFGTSGQKTKIISNRGENSCKATGQVCHALCSPEGCWGPEPRDCVSCRNVSRGRECVDKCNLLEGEPREFVENSECIQCHPECLPQAMNITCTGRGPDNCIQCAHYIDGPHCVKTCPAGVMGENNTLVWKYADAGHVCHLCHPNCTYGCTGPGLEGCPTNGPKIPSIATGMVGALLLLLVVALGIGLFM

SEQ ID NO: 4922 - protein, 844 aa, Artificial Sequence
  Synthetic Peptide
MVLQTQVFISLLLWISGAYGQEQLVESGGRLVTPGGSLTLSCKASGFDFSAYYMSWVRQAPGKGLEWIATIYPSSGKTYYATWVNGRFTISSDNAQNTVDLQMNSLTAADRATYFCARDSYADDGALFNIWGPGTLVTISSGGGGSGGGGSGGGGSELVLTQSPSVSAALGSPAKITCTLSSAHKTDTIDWYQQLQGEAPRYLMQVQSDGSYTKRPGVPDRFSGSSSGADRYLIIPSVQADDEADYYCGADYIGGYVFGGGTQLTVTGPKSCDKTHTCPPCPAPMFWVLVVVGGVLACYSLLVTVAFIIFWVKRGRKKLLYIFKQPFMRPVQTTQEEDGCSCRFPEEEEGGCELRVKFSRSADAPAYQQGQNQLYNELNLGRREEYDVLDKRRGRDPEMGGKPRRKNPQEGLYNELQKDKMAEAYSEIGMKGERRRGKGHDGLYQGLSTATKDTYDALHMQALPPRSGATNFSLLKQAGDVEENPGPMLLLVTSLLLCELPHPAFLLIPRKVCNGIGIGEFKDSLSINATNIKHFKNCTSISGDLHILPVAFRGDSFTHTPPLDPQELDILKTVKEITGFLLIQAWPENRTDLHAFENLEIIRGRTKQHGQFSLAVVSLNITSLGLRSLKEISDGDVIISGNKNLCYANTINWKKLFGTSGQKTKIISNRGENSCKATGQVCHALCSPEGCWGPEPRDCVSCRNVSRGRECVDKCNLLEGEPREFVENSECIQCHPECLPQAMNITCTGRGPDNCIQCAHYIDGPHCVKTCPAGVMGENNTLVWKYADAGHVCHLCHPNCTYGCTGPGLEGCPTNGPKIPSIATGMVGALLLLLVVALGIGLFM

SEQ ID NO: 4923 - protein, 839 aa, Artificial Sequence
  Synthetic Peptide
MVLQTQVFISLLLWISGAYGQEQLVESGGRLVTPGGSLTLSCKASGFDFSAYYMSWVRQAPGKGLEWIATIYPSSGKTYYATWVNGRFTISSDNAQNTVDLQMNSLTAADRATYFCARDSYADDGALFNIWGPGTLVTISSGGGGSGGGGSGGGGSELVLTQSPSVSAALGSPAKITCTLSSAHKTDTIDWYQQLQGEAPRYLMQVQSDGSYTKRPGVPDRFSGSSSGADRYLIIPSVQADDEADYYCGADYIGGYVFGGGTQLTVTGPCPAPPVAGPSMFWVLVVVGGVLACYSLLVTVAFIIFWVKRGRKKLLYIFKQPFMRPVQTTQEEDGCSCRFPEEEEGGCELRVKFSRSADAPAYQQGQNQLYNELNLGRREEYDVLDKRRGRDPEMGGKPRRKNPQEGLYNELQKDKMAEAYSEIGMKGERRRGKGHDGLYQGLSTATKDTYDALHMQALPPRSGATNFSLLKQAGDVEENPGPMLLLVTSLLLCELPHPAFLLIPRKVCNGIGIGEFKDSLSINATNIKHFKNCTSISGDLHILPVAFRGDSFTHTPPLDPQELDILKTVKEITGFLLIQAWPENRTDLHAFENLEIIRGRTKQHGQFSLAVVSLNITSLGLRSLKEISDGDVIISGNKNLCYANTINWKKLFGTSGQKTKIISNRGENSCKATGQVCHALCSPEGCWGPEPRDCVSCRNVSRGRECVDKCNLLEGEPREFVENSECIQCHPECLPQAMNITCTGRGPDNCIQCAHYIDGPHCVKTCPAGVMGENNTLVWKYADAGHVCHLCHPNCTYGCTGPGLEGCPTNGPKIPSIATGMVGALLLLLVVALGIGLFM

SEQ ID NO: 4924 - protein, 856 aa, Artificial Sequence
  Synthetic Peptide
MVLQTQVFISLLLWISGAYGQEQLVESGGRLVTPGGSLTLSCKASGFDFSAYYMSWVRQAPGKGLEWIATIYPSSGKTYYATWVNGRFTISSDNAQNTVDLQMNSLTAADRATYFCARDSYADDGALFNIWGPGTLVTISSGGGGSGGGGSGGGGSELVLTQSPSVSAALGSPAKITCTLSSAHKTDTIDWYQQLQGEAPRYLMQVQSDGSYTKRPGVPDRFSGSSSGADRYLIIPSVQADDEADYYCGADYIGGYVFGGGTQLTVTGTVPCPVPSTPPTPSPSTPPTPSPSCCHPMFWVLVVVGGVLACYSLLVTVAFIIFWVKRGRKKLLYIFKQPFMRPVQTTQEEDGCSCRFPEEEEGGCELRVKFSRSADAPAYQQGQNQLYNELNLGRREEYDVLDKRRGRDPEMGGKPRRKNPQEGLYNELQKDKMAEAYSEIGMKGERRRGKGHDGLYQGLSTATKDTYDALHMQALPPRSGATNFSLLKQAGDVEENPGPMLLLVTSLLLCELPHPAFLLIPRKVCNGIGIGEFKDSLSINATNIKHFKNCTSISGDLHILPVAFRGDSFTHTPPLDPQELDILKTVKEITGFLLIQAWPENRTDLHAFENLEIIRGRTKQHGQFSLAVVSLNITSLGLRSLKEISDGDVIISGNKNLCYANTINWKKLFGTSGQKTKIISNRGENSCKATGQVCHALCSPEGCWGPEPRDCVSCRNVSRGRECVDKCNLLEGEPREFVENSECIQCHPECLPQAMNITCTGRGPDNCIQCAHYIDGPHCVKTCPAGVMGENNTLVWKYADAGHVCHLCHPNCTYGCTGPGLEGCPTNGPKIPSIATGMVGALLLLLVVALGIGLFM

SEQ ID NO: 4925 - protein, 838 aa, Artificial Sequence
  Synthetic Peptide
MVLQTQVFISLLLWISGAYGQEQLVESGGRLVTPGGSLTLSCKASGFDFSAYYMSWVRQAPGKGLEWIATIYPSSGKTYYATWVNGRFTISSDNAQNTVDLQMNSLTAADRATYFCARDSYADDGALFNIWGPGTLVTISSGGGGSGGGGSGGGGSELVLTQSPSVSAALGSPAKITCTLSSAHKTDTIDWYQQLQGEAPRYLMQVQSDGSYTKRPGVPDRFSGSSSGADRYLIIPSVQADDEADYYCGADYIGGYVFGGGTQLTVTGSVCSRDFTPPMFWVLVVVGGVLACYSLLVTVAFIIFWVKRGRKKLLYIFKQPFMRPVQTTQEEDGCSCRFPEEEEGGCELRVKFSRSADAPAYQQGQNQLYNELNLGRREEYDVLDKRRGRDPEMGGKPRRKNPQEGLYNELQKDKMAEAYSEIGMKGERRRGKGHDGLYQGLSTATKDTYDALHMQALPPRSGATNFSLLKQAGDVEENPGPMLLLVTSLLLCELPHPAFLLIPRKVCNGIGIGEFKDSLSINATNIKHFKNCTSISGDLHILPVAFRGDSFTHTPPLDPQELDILKTVKEITGFLLIQAWPENRTDLHAFENLEIIRGRTKQHGQFSLAVVSLNITSLGLRSLKEISDGDVIISGNKNLCYANTINWKKLFGTSGQKTKIISNRGENSCKATGQVCHALCSPEGCWGPEPRDCVSCRNVSRGRECVDKCNLLEGEPREFVENSECIQCHPECLPQAMNITCTGRGPDNCIQCAHYIDGPHCVKTCPAGVMGENNTLVWKYADAGHVCHLCHPNCTYGCTGPGLEGCPTNGPKIPSIATGMVGALLLLLVVALGIGLFM

SEQ ID NO: 4926 - protein, 16 aa, Artificial Sequence
  Synthetic Peptide
EPRGPTIKPCPPCKCP

SEQ ID NO: 4927 - protein, 15 aa, Artificial Sequence
  Synthetic Peptide
EPRGPTIKPCPPCKC

SEQ ID NO: 4928 - protein, 15 aa, Artificial Sequence
  Synthetic Peptide
PRGPTIKPCPPCKCP

SEQ ID NO: 4929 - protein, 14 aa, Artificial Sequence
  Synthetic Peptide
EPRGPTIKPCPPCK

SEQ ID NO: 4930 - protein, 14 aa, Artificial Sequence
  Synthetic Peptide
PRGPTIKPCPPCKC

SEQ ID NO: 4931 - protein, 14 aa, Artificial Sequence
  Synthetic Peptide
RGPTIKPCPPCKCP

SEQ ID NO: 4932 - protein, 13 aa, Artificial Sequence
  Synthetic Peptide
EPRGPTIKPCPPC

SEQ ID NO: 4933 - protein, 13 aa, Artificial Sequence
  Synthetic Peptide
PRGPTIKPCPPCK

SEQ ID NO: 4934 - protein, 13 aa, Artificial Sequence
  Synthetic Peptide
RGPTIKPCPPCKC

SEQ ID NO: 4935 - protein, 13 aa, Artificial Sequence
  Synthetic Peptide
GPTIKPCPPCKCP

SEQ ID NO: 4936 - protein, 12 aa, Artificial Sequence
  Synthetic Peptide
EPRGPTIKPCPP

SEQ ID NO: 4937 - protein, 12 aa, Artificial Sequence
  Synthetic Peptide
PRGPTIKPCPPC

SEQ ID NO: 4938 - protein, 12 aa, Artificial Sequence
  Synthetic Peptide
RGPTIKPCPPCK

SEQ ID NO: 4939 - protein, 12 aa, Artificial Sequence
  Synthetic Peptide
GPTIKPCPPCKC

SEQ ID NO: 4940 - protein, 12 aa, Artificial Sequence
  Synthetic Peptide
PTIKPCPPCKCP

SEQ ID NO: 4941 - protein, 11 aa, Artificial Sequence
  Synthetic Peptide
EPRGPTIKPCP

SEQ ID NO: 4942 - protein, 11 aa, Artificial Sequence
  Synthetic Peptide
PRGPTIKPCPP

SEQ ID NO: 4943 - protein, 11 aa, Artificial Sequence
  Synthetic Peptide
RGPTIKPCPPC

SEQ ID NO: 4944 - protein, 11 aa, Artificial Sequence
  Synthetic Peptide
GPTIKPCPPCK

SEQ ID NO: 4945 - protein, 11 aa, Artificial Sequence
  Synthetic Peptide
PTIKPCPPCKC

SEQ ID NO: 4946 - protein, 11 aa, Artificial Sequence
  Synthetic Peptide
TIKPCPPCKCP

SEQ ID NO: 4947 - protein, 10 aa, Artificial Sequence
  Synthetic Peptide
EPRGPTIKPC

SEQ ID NO: 4948 - protein, 10 aa, Artificial Sequence
  Synthetic Peptide
PRGPTIKPCP

SEQ ID NO: 4949 - protein, 10 aa, Artificial Sequence
  Synthetic Peptide
RGPTIKPCPP

SEQ ID NO: 4950 - protein, 10 aa, Artificial Sequence
  Synthetic Peptide
GPTIKPCPPC

SEQ ID NO: 4951 - protein, 10 aa, Artificial Sequence
  Synthetic Peptide
PTIKPCPPCK

SEQ ID NO: 4952 - protein, 10 aa, Artificial Sequence
  Synthetic Peptide
TIKPCPPCKC

SEQ ID NO: 4953 - protein, 10 aa, Artificial Sequence
  Synthetic Peptide
IKPCPPCKCP

SEQ ID NO: 4954 - protein, 9 aa, Artificial Sequence
  Synthetic Peptide
KPCPPCKCP

SEQ ID NO: 4955 - protein, 9 aa, Artificial Sequence
  Synthetic Peptide
EPRGPTIKP

SEQ ID NO: 4956 - protein, 9 aa, Artificial Sequence
  Synthetic Peptide
PRGPTIKPC

SEQ ID NO: 4957 - protein, 9 aa, Artificial Sequence
  Synthetic Peptide
RGPTIKPCP

SEQ ID NO: 4958 - protein, 9 aa, Artificial Sequence
  Synthetic Peptide
GPTIKPCPP

SEQ ID NO: 4959 - protein, 9 aa, Artificial Sequence
  Synthetic Peptide
PTIKPCPPC

SEQ ID NO: 4960 - protein, 9 aa, Artificial Sequence
  Synthetic Peptide
TIKPCPPCK

SEQ ID NO: 4961 - protein, 9 aa, Artificial Sequence
  Synthetic Peptide
IKPCPPCKC

SEQ ID NO: 4962 - protein, 8 aa, Artificial Sequence
  Synthetic Peptide
KPCPPCKC

SEQ ID NO: 4963 - protein, 8 aa, Artificial Sequence
  Synthetic Peptide
PCPPCKCP

SEQ ID NO: 4964 - protein, 8 aa, Artificial Sequence
  Synthetic Peptide
EPRGPTIK

SEQ ID NO: 4965 - protein, 8 aa, Artificial Sequence
  Synthetic Peptide
PRGPTIKP

SEQ ID NO: 4966 - protein, 8 aa, Artificial Sequence
  Synthetic Peptide
RGPTIKPC

SEQ ID NO: 4967 - protein, 8 aa, Artificial Sequence
  Synthetic Peptide
GPTIKPCP

SEQ ID NO: 4968 - protein, 8 aa, Artificial Sequence
  Synthetic Peptide
PTIKPCPP

SEQ ID NO: 4969 - protein, 8 aa, Artificial Sequence
  Synthetic Peptide
TIKPCPPC

SEQ ID NO: 4970 - protein, 8 aa, Artificial Sequence
  Synthetic Peptide
IKPCPPCK

SEQ ID NO: 4971 - protein, 7 aa, Artificial Sequence
  Synthetic Peptide
EPRGPTI

SEQ ID NO: 4972 - protein, 7 aa, Artificial Sequence
  Synthetic Peptide
PRGPTIK

SEQ ID NO: 4973 - protein, 7 aa, Artificial Sequence
  Synthetic Peptide
RGPTIKP

SEQ ID NO: 4974 - protein, 7 aa, Artificial Sequence
  Synthetic Peptide
GPTIKPC

SEQ ID NO: 4975 - protein, 7 aa, Artificial Sequence
  Synthetic Peptide
PTIKPCP

SEQ ID NO: 4976 - protein, 7 aa, Artificial Sequence
  Synthetic Peptide
TIKPCPP

SEQ ID NO: 4977 - protein, 7 aa, Artificial Sequence
  Synthetic Peptide
IKPCPPC

SEQ ID NO: 4978 - protein, 7 aa, Artificial Sequence
  Synthetic Peptide
KPCPPCK

SEQ ID NO: 4979 - protein, 7 aa, Artificial Sequence
  Synthetic Peptide
PCPPCKC

SEQ ID NO: 4980 - protein, 7 aa, Artificial Sequence
  Synthetic Peptide
CPPCKCP

SEQ ID NO: 4981 - protein, 4 aa, Artificial Sequence
  Synthetic Peptide
DKKI

SEQ ID NO: 4982 - protein, 5 aa, Artificial Sequence
  Synthetic Peptide
VDKKI

SEQ ID NO: 4983 - protein, 4 aa, Artificial Sequence
  Synthetic Peptide
APNL

SEQ ID NO: 4984 - protein, 5 aa, Artificial Sequence
  Synthetic Peptide
APNLL

SEQ ID NO: 4985 - protein, 12 aa, Artificial Sequence
  Synthetic Peptide
ERKCCVECPPCP

SEQ ID NO: 4986 - protein, 16 aa, Artificial Sequence
  Synthetic Peptide
EPRGPTIKPCPPCKCP

SEQ ID NO: 4987 - protein, 12 aa, Artificial Sequence
  Synthetic Peptide
ESKYGPPCPSCP

SEQ ID NO: 4988 - protein, 12 aa, Artificial Sequence
  Synthetic Peptide
ESKYGPPCPPCP

SEQ ID NO: 4989 - protein, 9 aa, Artificial Sequence
  Synthetic Peptide
YGPPCPPCP

SEQ ID NO: 4990 - protein, 10 aa, Artificial Sequence
  Synthetic Peptide
KYGPPCPPCP

SEQ ID NO: 4991 - protein, 13 aa, Artificial Sequence
  Synthetic Peptide
EVVKYGPPCPPCP

SEQ ID NO: 4992 - protein, 24 aa, Artificial Sequence
  Synthetic Peptide
EPRGPTIKPCPPCKCPAPNLLGGP

SEQ ID NO: 4993 - protein, 398 aa, Artificial Sequence
  Synthetic Peptide
KTTAPSVYPLAPVCGDTTGSSVTLGCLVKGYFPEPVTLTWNSGSLSSGVHTFPAVLQSDLYTLSSSVTVTSSTWPSQSITCNVAHPASSTKVDKKIEPRGPTIKPCPPCKCPAPNLLGGPSVFIFPPKIKDVLMISLSPIVTCVVVDVSEDDPDVQISWFVNNVEVHTAQTQTHREDYNSTLRVVSALPIQHQDWMSGKEFKCKVNNKDLPAPIERTISKPKGSVRAPQVYVLPPPEEEMTKKQVTLTCMVTDFMPEDIYVEWTNNGKTELNYKNTEPVLDSDGSYFMYSKLRVEKKNWVERNSYSCSVVHEGLHNHHTTKSFSRTPGLDLDDVCAEAQDGELDGLWTTITIFISLFLLSVCYSASVTLFKVKWIFSSVVELKQTISPDYRNMIGQGA

SEQ ID NO: 4994 - protein, 353 aa, Artificial Sequence
  Synthetic Peptide
ASPTSPKVFPLSLCSTQPDGNVVIACLVQGFFPQEPLSVTWSESGQGVTARNFPPSQDASGDLYTTSSQLTLPATQCLAGKSVTCHVKHYTNPSQDVTVPCPVPSTPPTPSPSTPPTPSPSCCHPRLSLHRPALEDLLLGSEANLTCTLTGLRDASGVTFTWTPSSGKSAVQGPPERDLCGCYSVSSVLPGCAEPWNHGKTFTCTAAYPESKTPLTATLSKSGNTFRPEVHLLPPPSEELALNELVTLTCLARGFSPKDVLVRWLQGSQELPREKYLTWASRQEPSQGTTTFAVTSILRVAAEDWKKGDTFSCMVGHEALPLAFTQKTIDRLAGKPTHVNVSVVMAEVDGTCY

SEQ ID NO: 4995 - protein, 340 aa, Artificial Sequence
  Synthetic Peptide
ASPTSPKVFPLSLDSTPQDGNVVVACLVQGFFPQEPLSVTWSESGQNVTARNFPPSQDASGDLYTTSSQLTLPATQCPDGKSVTCHVKHYTNSSQDVTVPCRVPPPPPCCHPRLSLHRPALEDLLLGSEANLTCTLTGLRDASGATFTWTPSSGKSAVQGPPERDLCGCYSVSSVLPGCAQPWNHGETFTCTAAHPELKTPLTANITKSGNTFRPEVHLLPPPSEELALNELVTLTCLARGFSPKDVLVRWLQGSQELPREKYLTWASRQEPSQGTTTYAVTSILRVAAEDWKKGETFSCMVGHEALPLAFTQKTIDRMAGKPTHINVSVVMAEADGTCY

SEQ ID NO: 4996 - protein, 384 aa, Artificial Sequence
  Synthetic Peptide
APTKAPDVFPIISGCRHPKDNSPVVLACLITGYHPTSVTVTWYMGTQSQPQRTFPEIQRRDSYYMTSSQLSTPLQQWRQGEYKCVVQHTASKSKKEIFRWPESPKAQASSVPTAQPQAEGSLAKATTAPATTRNTGRGGEEKKKEKEKEEQEERETKTPECPSHTQPLGVYLLTPAVQDLWLRDKATFTCFVVGSDLKDAHLTWEVAGKVPTGGVEEGLLERHSNGSQSQHSRLTLPRSLWNAGTSVTCTLNHPSLPPQRLMALREPAAQAPVKLSLNLLASSDPPEAASWLLCEVSGFSPPNILLMWLEDQREVNTSGFAPARPPPQPRSTTFWAWSVLRVPAPPSPQPATYTCVVSHEDSRTLLNASRSLEVSYVTDHGPMK

SEQ ID NO: 4997 - protein, 428 aa, Artificial Sequence
  Synthetic Peptide
ASTQSPSVFPLTRCCKNIPSNATSVTLGCLATGYFPEPVMVTWDTGSLNGTTMTLPATTLTLSGHYATISLLTVSGAWAKQMFTCRVAHTPSSTDWVDNKTFSVCSRDFTPPTVKILQSSCDGGGHFPPTIQLLCLVSGYTPGTINITWLEDGQVMDVDLSTASTTQEGELASTQSELTLSQKHWLSDRTYTCQVTYQGHTFEDSTKKCADSNPRGVSAYLSRPSPFDLFIRKSPTITCLVVDLAPSKGTVNLTWSRASGKPVNHSTRKEEKQRNGTLTVTSTLPVGTRDWIEGETYQCRVTHPHLPRALMRSTTKTSGPRAAPEVYAFATPEWPGSRDKRTLACLIQNFMPEDISVQWLHNEVQLPDARHSTTQPRKTKGSGFFVFSRLEVTRAEWEQKDEFICRAVHEAASPSQTVQRAVSVNPGK

SEQ ID NO: 4998 - protein, 330 aa, Artificial Sequence [sequence omitted]

SEQ ID NO: 4999 - protein, 326 aa, Artificial Sequence
  Synthetic Peptide
ASTKGPSVFPLAPCSRSTSESTAALGCLVKDYFPEPVTVSWNSGALTSGVHTFPAVLQSSGLYSLSSVVTVPSSNFGTQTYTCNVDHKPSNTKVDKTVERKCCVECPPCPAPPVAGPSVFLFPPKPKDTLMISRTPEVTCVVVDVSHEDPEVQFNWYVDGVEVHNAKTKPREEQFNSTFRVVSVLTVVHQDWLNGKEYKCKVSNKGLPAPIEKTISKTKGQPREPQVYTLPPSREEMTKNQVSLTCLVKGFYPSDISVEWESNGQPENNYKTTPPMLDSDGSFFLYSKLTVDKSRWQQGNVFSCSVMHEALHNHYTQKSLSLSPGK

SEQ ID NO: 5000 - protein, 377 aa, Artificial Sequence
  Synthetic Peptide
ASTKGPSVFPLAPCSRSTSGGTAALGCLVKDYFPEPVTVSWNSGALTSGVHTFPAVLQSSGLYSLSSVVTVPSSSLGTQTYTCNVNHKPSNTKVDKRVELKTPLGDTTHTCPRCPEPKSCDTPPPCPRCPEPKSCDTPPPCPRCPEPKSCDTPPPCPRCPAPELLGGPSVFLFPPKPKDTLMISRTPEVTCVVVDVSHEDPEVQFKWYVDGVEVHNAKTKPREEQYNSTFRVVSVLTVLHQDWLNGKEYKCKVSNKALPAPIEKTISKTKGQPREPQVYTLPPSREEMTKNQVSLTCLVKGFYPSDIAVEWESSGQPENNYNTTPPMLDSDGSFFLYSKLTVDKSRWQQGNIFSCSVMHEALHNRFTQKSLSLSPGK

SEQ ID NO: 5001 - protein, 327 aa, Artificial Sequence
  Synthetic Peptide
ASTKGPSVFPLAPCSRSTSESTAALGCLVKDYFPEPVTVSWNSGALTSGVHTFPAVLQSSGLYSLSSVVTVPSSSLGTKTYTCNVDHKPSNTKVDKRVESKYGPPCPSCPAPEFLGGPSVFLFPPKPKDTLMISRTPEVTCVVVDVSQEDPEVQFNWYVDGVEVHNAKTKPREEQFNSTYRVVSVLTVLHQDWLNGKEYKCKVSNKGLPSSIEKTISKAKGQPREPQVYTLPPSQEEMTKNQVSLTCLVKGFYPSDIAVEWESNGQPENNYKTTPPVLDSDGSFFLYSRLTVDKSRWQEGNVFSCSVMHEALHNHYTQKSLSLSLGK

SEQ ID NO: 5002 - protein, 453 aa, Artificial Sequence
  Synthetic Peptide
GSASAPTLFPLVSCENSPSDTSSVAVGCLAQDFLPDSITFSWKYKNNSDISSTRGFPSVLRGGKYAATSQVLLPSKDVMQGTDEHVVCKVQHPNGNKEKNVPLPVIAELPPKVSVFVPPRDGFFGNPRKSKLICQATGFSPRQIQVSWLREGKQVGSGVTTDQVQAEAKESGPTTYKVTSTLTIKESDWLGQSMFTCRVDHRGLTFQQNASSMCVPDQDTAIRVFAIPPSFASIFLTKSTKLTCLVTDLTTYDSVTISWTRQNGEAVKTHTNISESHPNATFSAVGEASICEDDWNSGERFTCTVTHTDLPSPLKQTISRPKGVALHRPDVYLLPPAREQLNLRESATITCLVTGFSPADVFVQWMQRGQPLSPEKYVTSAPMPEPQAPGRYFAHSILTVSEEEWNTGETYTCVVAHEALPNRVTERTVDKSTGKPTLYNVSLVMSDTAGTCY

SEQ ID NO: 5003 - protein, 16 aa, Artificial Sequence
  scFv linker
GSTSGSGKPGSGEGSG

SEQ ID NO: 5004 - protein, 870 aa, Artificial Sequence
  scFv linker
MVLQTQVFISLLLWISGAYGDIQMTQSPSSLSASVGDRVTITCRASQDVNTAVAWYQQKPGKAPKLLIYSASFLYSGVPSRFSGSRSGTDFTLTISSLQPEDFATYYCQQHYTTPPTFGQGTKVEIKGSTSGSGKPGSGEGSGEVQLVESGGGLVQPGGSLRLSCAASGFNIKDTYIHWVRQAPGKGLEWVARIYPTNGYTRYADSVKGRFTISADTSKNTAYLQMNSLRAEDTAVYYCSRWGGDGFYAMDYWGQGTLVTVSSEPKSCDTPPPCPRCPEPKSCDTPPPCPRCPEPKSCDTPPPCPRCPAPMFWVLVVVGGVLACYSLLVTVAFIIFWVKRGRKKLLYIFKQPFMRPVQTTQEEDGCSCRFPEEEEGGCELRVKFSRSADAPAYQQGQNQLYNELNLGRREEYDVLDKRRGRDPEMGGKPRRKNPQEGLYNELQKDKMAEAYSEIGMKGERRRGKGHDGLYQGLSTATKDTYDALHMQALPPRSGATNFSLLKQAGDVEENPGPMLLLVTSLLLCELPHPAFLLIPRKVCNGIGIGEFKDSLSINATNIKHFKNCTSISGDLHILPVAFRGDSFTHTPPLDPQELDILKTVKEITGFLLIQAWPENRTDLHAFENLEIIRGRTKQHGQFSLAVVSLNITSLGLRSLKEISDGDVIISGNKNLCYANTINWKKLFGTSGQKTKIISNRGENSCKATGQVCHALCSPEGCWGPEPRDCVSCRNVSRGRECVDKCNLLEGEPREFVENSECIQCHPECLPQAMNITCTGRGPDNCIQCAHYIDGPHCVKTCPAGVMGENNTLVWKYADAGHVCHLCHPNCTYGCTGPGLEGCPTNGPKIPSIATGMVGALLLLLVVALGIGLFM

SEQ ID NO: 5005 - protein, 870 aa, Artificial Sequence; identical to SEQ ID NO: 5004
  scFv linker

SEQ ID NO: 5006 - protein, 855 aa, Artificial Sequence
  scFv linker
MVLQTQVFISLLLWISGAYGDIQMTQSPSSLSASVGDRVTITCRASQDVNTAVAWYQQKPGKAPKLLIYSASFLYSGVPSRFSGSRSGTDFTLTISSLQPEDFATYYCQQHYTTPPTFGQGTKVEIKGSTSGSGKPGSGEGSGEVQLVESGGGLVQPGGSLRLSCAASGFNIKDTYIHWVRQAPGKGLEWVARIYPTNGYTRYADSVKGRFTISADTSKNTAYLQMNSLRAEDTAVYYCSRWGGDGFYAMDYWGQGTLVTVSSEPKSCDTPPPCPRCPEPKSCDTPPPCPRCPAPMFWVLVVVGGVLACYSLLVTVAFIIFWVKRGRKKLLYIFKQPFMRPVQTTQEEDGCSCRFPEEEEGGCELRVKFSRSADAPAYQQGQNQLYNELNLGRREEYDVLDKRRGRDPEMGGKPRRKNPQEGLYNELQKDKMAEAYSEIGMKGERRRGKGHDGLYQGLSTATKDTYDALHMQALPPRSGATNFSLLKQAGDVEENPGPMLLLVTSLLLCELPHPAFLLIPRKVCNGIGIGEFKDSLSINATNIKHFKNCTSISGDLHILPVAFRGDSFTHTPPLDPQELDILKTVKEITGFLLIQAWPENRTDLHAFENLEIIRGRTKQHGQFSLAVVSLNITSLGLRSLKEISDGDVIISGNKNLCYANTINWKKLFGTSGQKTKIISNRGENSCKATGQVCHALCSPEGCWGPEPRDCVSCRNVSRGRECVDKCNLLEGEPREFVENSECIQCHPECLPQAMNITCTGRGPDNCIQCAHYIDGPHCVKTCPAGVMGENNTLVWKYADAGHVCHLCHPNCTYGCTGPGLEGCPTNGPKIPSIATGMVGALLLLLVVALGIGLFM

SEQ ID NO: 5007 - protein, 845 aa, Artificial Sequence
  scFv linker
MVLQTQVFISLLLWISGAYGDIQMTQSPSSLSASVGDRVTITCRASQDVNTAVAWYQQKPGKAPKLLIYSASFLYSGVPSRFSGSRSGTDFTLTISSLQPEDFATYYCQQHYTTPPTFGQGTKVEIKGSTSGSGKPGSGEGSGEVQLVESGGGLVQPGGSLRLSCAASGFNIKDTYIHWVRQAPGKGLEWVARIYPTNGYTRYADSVKGRFTISADTSKNTAYLQMNSLRAEDTAVYYCSRWGGDGFYAMDYWGQGTLVTVSSCPRCPEPKSCDTPPPCPRCPAPMFWVLVVVGGVLACYSLLVTVAFIIFWVKRGRKKLLYIFKQPFMRPVQTTQEEDGCSCRFPEEEEGGCELRVKFSRSADAPAYQQGQNQLYNELNLGRREEYDVLDKRRGRDPEMGGKPRRKNPQEGLYNELQKDKMAEAYSEIGMKGERRRGKGHDGLYQGLSTATKDTYDALHMQALPPRSGATNFSLLKQAGDVEENPGPMLLLVTSLLLCELPHPAFLLIPRKVCNGIGIGEFKDSLSINATNIKHFKNCTSISGDLHILPVAFRGDSFTHTPPLDPQELDILKTVKEITGFLLIQAWPENRTDLHAFENLEIIRGRTKQHGQFSLAVVSLNITSLGLRSLKEISDGDVIISGNKNLCYANTINWKKLFGTSGQKTKIISNRGENSCKATGQVCHALCSPEGCWGPEPRDCVSCRNVSRGRECVDKCNLLEGEPREFVENSECIQCHPECLPQAMNITCTGRGPDNCIQCAHYIDGPHCVKTCPAGVMGENNTLVWKYADAGHVCHLCHPNCTYGCTGPGLEGCPTNGPKIPSIATGMVGALLLLLVVALGIGLFM

SEQ ID NO: 5008 - protein, 851 aa, Artificial Sequence
  scFv linker
MVLQTQVFISLLLWISGAYGDIQMTQSPSSLSASVGDRVTITCRASQDVNTAVAWYQQKPGKAPKLLIYSASFLYSGVPSRFSGSRSGTDFTLTISSLQPEDFATYYCQQHYTTPPTFGQGTKVEIKGSTSGSGKPGSGEGSGEVQLVESGGGLVQPGGSLRLSCAASGFNIKDTYIHWVRQAPGKGLEWVARIYPTNGYTRYADSVKGRFTISADTSKNTAYLQMNSLRAEDTAVYYCSRWGGDGFYAMDYWGQGTLVTVSSTVPCPVPSTPPTPSPSTPPTPSPSCCHPMFWVLVVVGGVLACYSLLVTVAFIIFWVKRGRKKLLYIFKQPFMRPVQTTQEEDGCSCRFPEEEEGGCELRVKFSRSADAPAYQQGQNQLYNELNLGRREEYDVLDKRRGRDPEMGGKPRRKNPQEGLYNELQKDKMAEAYSEIGMKGERRRGKGHDGLYQGLSTATKDTYDALHMQALPPRSGATNFSLLKQAGDVEENPGPMLLLVTSLLLCELPHPAFLLIPRKVCNGIGIGEFKDSLSINATNIKHFKNCTSISGDLHILPVAFRGDSFTHTPPLDPQELDILKTVKEITGFLLIQAWPENRTDLHAFENLEIIRGRTKQHGQFSLAVVSLNITSLGLRSLKEISDGDVIISGNKNLCYANTINWKKLFGTSGQKTKIISNRGENSCKATGQVCHALCSPEGCWGPEPRDCVSCRNVSRGRECVDKCNLLEGEPREFVENSECIQCHPECLPQAMNITCTGRGPDNCIQCAHYIDGPHCVKTCPAGVMGENNTLVWKYADAGHVCHLCHPNCTYGCTGPGLEGCPTNGPKIPSIATGMVGALLLLLVVALGIGLFM

SEQ ID NO: 5009 - protein, 162 aa, artificial sequence
  scFv linker
LQDPCSNCPAGTFCDNNRNQICSPCPPNSFSSAGGQRTCDICRQCKGVFRTRKECSSTSNAECDCTPGFHCLGAGCSMCEQDCKQGQELTKKGCKDCCFGTFNDQKRGICRPWTNCSLDGKSVLVNGTKERDVVCGPSPADLSPGASSVTPPAPAREPGHSP

SEQ ID NO: 5010 - protein, 81 aa, artificial sequence
  scFv linker
DCKQGQELTKKGCKDCCFGTFNDQKRGICRPWTNCSLDGKSVLVNGTKERDVVCGPSPADLSPGASSVTPPAPAREPGHSP

SEQ ID NO: 5011 - protein, 27 aa, artificial sequence
  scFv linker
GPSPADLSPGASSVTPPAPAREPGHSP

SEQ ID NO: 5012 - protein, 49 aa, artificial sequence
  scFv linker
ASSGTTTPAPRPPTPAPTIASQPLSLRPEACRPAAGGAVHTRGLDFACD

SEQ ID NO: 5013 - protein, 171 aa, artificial sequence
  scFv linker
TPAPKSCPERHYWAQGKLCCQMCEPGTFLVKDCDQHRKAAQCDPCIPGVSFSPDHHTRPHCESCRHCNSGLLVRNCTITANAECACRNGWQCRDKECTECDPLPNPSLTARSSQALSPHPQPTHLPYVSEMLEARTAGHMQTLADFRQLPARTLSTHWPPQRSLCSSDFIR

SEQ ID NO: 5014 - protein, 70 aa, artificial sequence
  scFv linker
PLPNPSLTARSSQALSPHPQPTHLPYVSEMLEARTAGHMQTLADFRQLPARTLSTHWPPQRSLCSSDFIR

SEQ ID NO: 5015 - protein, 39 aa, artificial sequence
  scFv linker
IEVMYPPPYLDNEKSNGTIIHVKGKHLCPSPLFPGPSKP

SEQ ID NO: 5016 - protein, 12 aa, artificial sequence
  scFv linker
ESKYGPPSPPSP

SEQ ID NO: 5017 - protein, 30 aa, artificial sequence
  scFv linker
QTTPGERSSLPAFYPGTSGSCSGCGSLSLP

SEQ ID NO: 5018 - protein, 12 aa, artificial sequence
  scFv linker
ESKYGPPSPPSP

SEQ ID NO: 5019 - protein, 26 aa, artificial sequence
  scFv linker
DPPPFKVTLTGGYLHIYESQLCCQLK

SEQ ID NO: 5020 - protein, 48 aa, artificial sequence
  scFv linker
EDRDPPATQPQETQGPPARPITVQPTEAWPRTSQGPSTRPVEVPGGRA

SEQ ID NO: 5021 - protein, 844 aa, artificial sequence
  4864 R12 / Reference - with GGGSG linker
MLLLVTSLLLCELPHPAFLLIPDIQMTQTTSSLSASLGDRVTISCRASQDISKYLNWYQQKPDGTVKLLIYHTSRLHSGVPSRFSGSGSGTDYSLTISNLEQEDIATYFCQQGNTLPYTFGGGTKLEITGSTSGSGKPGSGEGSTKGEVKLQESGPGLVAPSQSLSVTCTVSGVSLPDYGVSWIRQPPRKGLEWLGVIWGSETTYYNSALKSRLTIIKDNSKSQVFLKMNSLQTDDTAIYYCAKHYYYGGSYAMDYWGQGTSVTVSSGGGSGESKYGPPCPPCPMFWVLVVVGGVLACYSLLVTVAFIIFWVKRGRKKLLYIFKQPFMRPVQTTQEEDGCSCRFPEEEEGGCELRVKFSRSADAPAYQQGQNQLYNELNLGRREEYDVLDKRRGRDPEMGGKPRRKNPQEGLYNELQKDKMAEAYSEIGMKGERRRGKGHDGLYQGLSTATKDTYDALHMQALPPRSGATNFSLLKQAGDVEENPGPMLLLVTSLLLCELPHPAFLLIPRKVCNGIGIGEFKDSLSINATNIKHFKNCTSISGDLHILPVAFRGDSFTHTPPLDPQELDILKTVKEITGFLLIQAWPENRTDLHAFENLEIIRGRTKQHGQFSLAVVSLNITSLGLRSLKEISDGDVIISGNKNLCYANTINWKKLFGTSGQKTKIISNRGENSCKATGQVCHALCSPEGCWGPEPRDCVSCRNVSRGRECVDKCNLLEGEPREFVENSECIQCHPECLPQAMNITCTGRGPDNCIQCAHYIDGPHCVKTCPAGVMGENNTLVWKYADAGHVCHLCHPNCTYGCTGPGLEGCPTNGPKIPSIATGMVGALLLLLVVALGIGLFM

SEQ ID NO: 5022 - protein, 841 aa, artificial sequence
  4914 (spacer 1) - with GGGSG linker
MLLLVTSLLLCELPHPAFLLIPDIQMTQTTSSLSASLGDRVTISCRASQDISKYLNWYQQKPDGTVKLLIYHTSRLHSGVPSRFSGSGSGTDYSLTISNLEQEDIATYFCQQGNTLPYTFGGGTKLEITGSTSGSGKPGSGEGSTKGEVKLQESGPGLVAPSQSLSVTCTVSGVSLPDYGVSWIRQPPRKGLEWLGVIWGSETTYYNSALKSRLTIIKDNSKSQVFLKMNSLQTDDTAIYYCAKHYYYGGSYAMDYWGQGTSVTVSSGGGSGKPCPPCKCPMFWVLVVVGGVLACYSLLVTVAFIIFWVKRGRKKLLYIFKQPFMRPVQTTQEEDGCSCRFPEEEEGGCELRVKFSRSADAPAYQQGQNQLYNELNLGRREEYDVLDKRRGRDPEMGGKPRRKNPQEGLYNELQKDKMAEAYSEIGMKGERRRGKGHDGLYQGLSTATKDTYDALHMQALPPRSGATNFSLLKQAGDVEENPGPMLLLVTSLLLCELPHPAFLLIPRKVCNGIGIGEFKDSLSINATNIKHFKNCTSISGDLHILPVAFRGDSFTHTPPLDPQELDILKTVKEITGFLLIQAWPENRTDLHAFENLEIIRGRTKQHGQFSLAVVSLNITSLGLRSLKEISDGDVIISGNKNLCYANTINWKKLFGTSGQKTKIISNRGENSCKATGQVCHALCSPEGCWGPEPRDCVSCRNVSRGRECVDKCNLLEGEPREFVENSECIQCHPECLPQAMNITCTGRGPDNCIQCAHYIDGPHCVKTCPAGVMGENNTLVWKYADAGHVCHLCHPNCTYGCTGPGLEGCPTNGPKIPSIATGMVGALLLLLVVALGIGLFM

SEQ ID NO: 5023 - protein, 848 aa, artificial sequence
  4915 (spacer 11)- with GGGSG linker
MLLLVTSLLLCELPHPAFLLIPDIQMTQTTSSLSASLGDRVTISCRASQDISKYLNWYQQKPDGTVKLLIYHTSRLHSGVPSRFSGSGSGTDYSLTISNLEQEDIATYFCQQGNTLPYTFGGGTKLEITGSTSGSGKPGSGEGSTKGEVKLQESGPGLVAPSQSLSVTCTVSGVSLPDYGVSWIRQPPRKGLEWLGVIWGSETTYYNSALKSRLTIIKDNSKSQVFLKMNSLQTDDTAIYYCAKHYYYGGSYAMDYWGQGTSVTVSSGGGSGPKSCDKTHTCPPCPAPMFWVLVVVGGVLACYSLLVTVAFIIFWVKRGRKKLLYIFKQPFMRPVQTTQEEDGCSCRFPEEEEGGCELRVKFSRSADAPAYQQGQNQLYNELNLGRREEYDVLDKRRGRDPEMGGKPRRKNPQEGLYNELQKDKMAEAYSEIGMKGERRRGKGHDGLYQGLSTATKDTYDALHMQALPPRSGATNFSLLKQAGDVEENPGPMLLLVTSLLLCELPHPAFLLIPRKVCNGIGIGEFKDSLSINATNIKHFKNCTSISGDLHILPVAFRGDSFTHTPPLDPQELDILKTVKEITGFLLIQAWPENRTDLHAFENLEIIRGRTKQHGQFSLAVVSLNITSLGLRSLKEISDGDVIISGNKNLCYANTINWKKLFGTSGQKTKIISNRGENSCKATGQVCHALCSPEGCWGPEPRDCVSCRNVSRGRECVDKCNLLEGEPREFVENSECIQCHPECLPQAMNITCTGRGPDNCIQCAHYIDGPHCVKTCPAGVMGENNTLVWKYADAGHVCHLCHPNCTYGCTGPGLEGCPTNGPKIPSIATGMVGALLLLLVVALGIGLFM

SEQ ID NO: 5024 - protein, 840 aa, artificial sequence
  4916 (spacer 13) - with GGGSG linker
MLLLVTSLLLCELPHPAFLLIPDIQMTQTTSSLSASLGDRVTISCRASQDISKYLNWYQQKPDGTVKLLIYHTSRLHSGVPSRFSGSGSGTDYSLTISNLEQEDIATYFCQQGNTLPYTFGGGTKLEITGSTSGSGKPGSGEGSTKGEVKLQESGPGLVAPSQSLSVTCTVSGVSLPDYGVSWIRQPPRKGLEWLGVIWGSETTYYNSALKSRLTIIKDNSKSQVFLKMNSLQTDDTAIYYCAKHYYYGGSYAMDYWGQGTSVTVSSGGGSGPCPRCPAPMFWVLVVVGGVLACYSLLVTVAFIIFWVKRGRKKLLYIFKQPFMRPVQTTQEEDGCSCRFPEEEEGGCELRVKFSRSADAPAYQQGQNQLYNELNLGRREEYDVLDKRRGRDPEMGGKPRRKNPQEGLYNELQKDKMAEAYSEIGMKGERRRGKGHDGLYQGLSTATKDTYDALHMQALPPRSGATNFSLLKQAGDVEENPGPMLLLVTSLLLCELPHPAFLLIPRKVCNGIGIGEFKDSLSINATNIKHFKNCTSISGDLHILPVAFRGDSFTHTPPLDPQELDILKTVKEITGFLLIQAWPENRTDLHAFENLEIIRGRTKQHGQFSLAVVSLNITSLGLRSLKEISDGDVIISGNKNLCYANTINWKKLFGTSGQKTKIISNRGENSCKATGQVCHALCSPEGCWGPEPRDCVSCRNVSRGRECVDKCNLLEGEPREFVENSECIQCHPECLPQAMNITCTGRGPDNCIQCAHYIDGPHCVKTCPAGVMGENNTLVWKYADAGHVCHLCHPNCTYGCTGPGLEGCPTNGPKIPSIATGMVGALLLLLVVALGIGLFM

SEQ ID NO: 5025 - protein, 843 aa, artificial sequence
  4917 (spacer 14) - with GGGSG linker
MLLLVTSLLLCELPHPAFLLIPDIQMTQTTSSLSASLGDRVTISCRASQDISKYLNWYQQKPDGTVKLLIYHTSRLHSGVPSRFSGSGSGTDYSLTISNLEQEDIATYFCQQGNTLPYTFGGGTKLEITGSTSGSGKPGSGEGSTKGEVKLQESGPGLVAPSQSLSVTCTVSGVSLPDYGVSWIRQPPRKGLEWLGVIWGSETTYYNSALKSRLTIIKDNSKSQVFLKMNSLQTDDTAIYYCAKHYYYGGSYAMDYWGQGTSVTVSSGGGSGPCPAPPVAGPSMFWVLVVVGGVLACYSLLVTVAFIIFWVKRGRKKLLYIFKQPFMRPVQTTQEEDGCSCRFPEEEEGGCELRVKFSRSADAPAYQQGQNQLYNELNLGRREEYDVLDKRRGRDPEMGGKPRRKNPQEGLYNELQKDKMAEAYSEIGMKGERRRGKGHDGLYQGLSTATKDTYDALHMQALPPRSGATNFSLLKQAGDVEENPGPMLLLVTSLLLCELPHPAFLLIPRKVCNGIGIGEFKDSLSINATNIKHFKNCTSISGDLHILPVAFRGDSFTHTPPLDPQELDILKTVKEITGFLLIQAWPENRTDLHAFENLEIIRGRTKQHGQFSLAVVSLNITSLGLRSLKEISDGDVIISGNKNLCYANTINWKKLFGTSGQKTKIISNRGENSCKATGQVCHALCSPEGCWGPEPRDCVSCRNVSRGRECVDKCNLLEGEPREFVENSECIQCHPECLPQAMNITCTGRGPDNCIQCAHYIDGPHCVKTCPAGVMGENNTLVWKYADAGHVCHLCHPNCTYGCTGPGLEGCPTNGPKIPSIATGMVGALLLLLVVALGIGLFM

SEQ ID NO: 5026 - protein, 845 aa, artificial sequence
  4873 / Reference - with GGGSG linker
MVLQTQVFISLLLWISGAYGQEQLVESGGRLVTPGGSLTLSCKASGFDFSAYYMSWVRQAPGKGLEWIATIYPSSGKTYYATWVNGRFTISSDNAQNTVDLQMNSLTAADRATYFCARDSYADDGALFNIWGPGTLVTISSGGGGSGGGGSGGGGSELVLTQSPSVSAALGSPAKITCTLSSAHKTDTIDWYQQLQGEAPRYLMQVQSDGSYTKRPGVPDRFSGSSSGADRYLIIPSVQADDEADYYCGADYIGGYVFGGGTQLTVTGGGGSGESKYGPPCPPCPMFWVLVVVGGVLACYSLLVTVAFIIFWVKRGRKKLLYIFKQPFMRPVQTTQEEDGCSCRFPEEEEGGCELRVKFSRSADAPAYQQGQNQLYNELNLGRREEYDVLDKRRGRDPEMGGKPRRKNPQEGLYNELQKDKMAEAYSEIGMKGERRRGKGHDGLYQGLSTATKDTYDALHMQALPPRSGATNFSLLKQAGDVEENPGPMLLLVTSLLLCELPHPAFLLIPRKVCNGIGIGEFKDSLSINATNIKHFKNCTSISGDLHILPVAFRGDSFTHTPPLDPQELDILKTVKEITGFLLIQAWPENRTDLHAFENLEIIRGRTKQHGQFSLAVVSLNITSLGLRSLKEISDGDVIISGNKNLCYANTINWKKLFGTSGQKTKIISNRGENSCKATGQVCHALCSPEGCWGPEPRDCVSCRNVSRGRECVDKCNLLEGEPREFVENSECIQCHPECLPQAMNITCTGRGPDNCIQCAHYIDGPHCVKTCPAGVMGENNTLVWKYADAGHVCHLCHPNCTYGCTGPGLEGCPTNGPKIPSIATGMVGALLLLLVVALGIGLFM

SEQ ID NO: 5027 - protein, 865 aa, artificial sequence
  4918 (Spacer 7) - with GGGSG linker
MVLQTQVFISLLLWISGAYGQEQLVESGGRLVTPGGSLTLSCKASGFDFSAYYMSWVRQAPGKGLEWIATIYPSSGKTYYATWVNGRFTISSDNAQNTVDLQMNSLTAADRATYFCARDSYADDGALFNIWGPGTLVTISSGGGGSGGGGSGGGGSELVLTQSPSVSAALGSPAKITCTLSSAHKTDTIDWYQQLQGEAPRYLMQVQSDGSYTKRPGVPDRFSGSSSGADRYLIIPSVQADDEADYYCGADYIGGYVFGGGTQLTVTGGGGSGEPKSCDTPPPCPRCPEPKSCDTPPPCPRCPAPMFWVLVVVGGVLACYSLLVTVAFIIFWVKRGRKKLLYIFKQPFMRPVQTTQEEDGCSCRFPEEEEGGCELRVKFSRSADAPAYQQGQNQLYNELNLGRREEYDVLDKRRGRDPEMGGKPRRKNPQEGLYNELQKDKMAEAYSEIGMKGERRRGKGHDGLYQGLSTATKDTYDALHMQALPPRSGATNFSLLKQAGDVEENPGPMLLLVTSLLLCELPHPAFLLIPRKVCNGIGIGEFKDSLSINATNIKHFKNCTSISGDLHILPVAFRGDSFTHTPPLDPQELDILKTVKEITGFLLIQAWPENRTDLHAFENLEIIRGRTKQHGQFSLAVVSLNITSLGLRSLKEISDGDVIISGNKNLCYANTINWKKLFGTSGQKTKIISNRGENSCKATGQVCHALCSPEGCWGPEPRDCVSCRNVSRGRECVDKCNLLEGEPREFVENSECIQCHPECLPQAMNITCTGRGPDNCIQCAHYIDGPHCVKTCPAGVMGENNTLVWKYADAGHVCHLCHPNCTYGCTGPGLEGCPTNGPKIPSIATGMVGALLLLLVVALGIGLFM

SEQ ID NO: 5028 - protein, 855 aa, artificial sequence
  4919 (Spacer 8) - with GGGSG linker
MVLQTQVFISLLLWISGAYGQEQLVESGGRLVTPGGSLTLSCKASGFDFSAYYMSWVRQAPGKGLEWIATIYPSSGKTYYATWVNGRFTISSDNAQNTVDLQMNSLTAADRATYFCARDSYADDGALFNIWGPGTLVTISSGGGGSGGGGSGGGGSELVLTQSPSVSAALGSPAKITCTLSSAHKTDTIDWYQQLQGEAPRYLMQVQSDGSYTKRPGVPDRFSGSSSGADRYLIIPSVQADDEADYYCGADYIGGYVFGGGTQLTVTGGGGSGCPRCPEPKSCDTPPPCPRCPAPMFWVLVVVGGVLACYSLLVTVAFIIFWVKRGRKKLLYIFKQPFMRPVQTTQEEDGCSCRFPEEEEGGCELRVKFSRSADAPAYQQGQNQLYNELNLGRREEYDVLDKRRGRDPEMGGKPRRKNPQEGLYNELQKDKMAEAYSEIGMKGERRRGKGHDGLYQGLSTATKDTYDALHMQALPPRSGATNFSLLKQAGDVEENPGPMLLLVTSLLLCELPHPAFLLIPRKVCNGIGIGEFKDSLSINATNIKHFKNCTSISGDLHILPVAFRGDSFTHTPPLDPQELDILKTVKEITGFLLIQAWPENRTDLHAFENLEIIRGRTKQHGQFSLAVVSLNITSLGLRSLKEISDGDVIISGNKNLCYANTINWKKLFGTSGQKTKIISNRGENSCKATGQVCHALCSPEGCWGPEPRDCVSCRNVSRGRECVDKCNLLEGEPREFVENSECIQCHPECLPQAMNITCTGRGPDNCIQCAHYIDGPHCVKTCPAGVMGENNTLVWKYADAGHVCHLCHPNCTYGCTGPGLEGCPTNGPKIPSIATGMVGALLLLLVVALGIGLFM

SEQ ID NO: 5029 - protein, 850 aa, artificial sequence
  4920 (Spacer 9) - with GGGSG linker
MVLQTQVFISLLLWISGAYGQEQLVESGGRLVTPGGSLTLSCKASGFDFSAYYMSWVRQAPGKGLEWIATIYPSSGKTYYATWVNGRFTISSDNAQNTVDLQMNSLTAADRATYFCARDSYADDGALFNIWGPGTLVTISSGGGGSGGGGSGGGGSELVLTQSPSVSAALGSPAKITCTLSSAHKTDTIDWYQQLQGEAPRYLMQVQSDGSYTKRPGVPDRFSGSSSGADRYLIIPSVQADDEADYYCGADYIGGYVFGGGTQLTVTGGGGSGEPKSCDTPPPCPRCPAPMFWVLVVVGGVLACYSLLVTVAFIIFWVKRGRKKLLYIFKQPFMRPVQTTQEEDGCSCRFPEEEEGGCELRVKFSRSADAPAYQQGQNQLYNELNLGRREEYDVLDKRRGRDPEMGGKPRRKNPQEGLYNELQKDKMAEAYSEIGMKGERRRGKGHDGLYQGLSTATKDTYDALHMQALPPRSGATNFSLLKQAGDVEENPGPMLLLVTSLLLCELPHPAFLLIPRKVCNGIGIGEFKDSLSINATNIKHFKNCTSISGDLHILPVAFRGDSFTHTPPLDPQELDILKTVKEITGFLLIQAWPENRTDLHAFENLEIIRGRTKQHGQFSLAVVSLNITSLGLRSLKEISDGDVIISGNKNLCYANTINWKKLFGTSGQKTKIISNRGENSCKATGQVCHALCSPEGCWGPEPRDCVSCRNVSRGRECVDKCNLLEGEPREFVENSECIQCHPECLPQAMNITCTGRGPDNCIQCAHYIDGPHCVKTCPAGVMGENNTLVWKYADAGHVCHLCHPNCTYGCTGPGLEGCPTNGPKIPSIATGMVGALLLLLVVALGIGLFM

SEQ ID NO: 5030 - protein, 850 aa, artificial sequence
  4921 (Spacer 10) - with GGGSG linker
MVLQTQVFISLLLWISGAYGQEQLVESGGRLVTPGGSLTLSCKASGFDFSAYYMSWVRQAPGKGLEWIATIYPSSGKTYYATWVNGRFTISSDNAQNTVDLQMNSLTAADRATYFCARDSYADDGALFNIWGPGTLVTISSGGGGSGGGGSGGGGSELVLTQSPSVSAALGSPAKITCTLSSAHKTDTIDWYQQLQGEAPRYLMQVQSDGSYTKRPGVPDRFSGSSSGADRYLIIPSVQADDEADYYCGADYIGGYVFGGGTQLTVTGGGGSGEPKSCDKTHTCPPCPAPMFWVLVVVGGVLACYSLLVTVAFIIFWVKRGRKKLLYIFKQPFMRPVQTTQEEDGCSCRFPEEEEGGCELRVKFSRSADAPAYQQGQNQLYNELNLGRREEYDVLDKRRGRDPEMGGKPRRKNPQEGLYNELQKDKMAEAYSEIGMKGERRRGKGHDGLYQGLSTATKDTYDALHMQALPPRSGATNFSLLKQAGDVEENPGPMLLLVTSLLLCELPHPAFLLIPRKVCNGIGIGEFKDSLSINATNIKHFKNCTSISGDLHILPVAFRGDSFTHTPPLDPQELDILKTVKEITGFLLIQAWPENRTDLHAFENLEIIRGRTKQHGQFSLAVVSLNITSLGLRSLKEISDGDVIISGNKNLCYANTINWKKLFGTSGQKTKIISNRGENSCKATGQVCHALCSPEGCWGPEPRDCVSCRNVSRGRECVDKCNLLEGEPREFVENSECIQCHPECLPQAMNITCTGRGPDNCIQCAHYIDGPHCVKTCPAGVMGENNTLVWKYADAGHVCHLCHPNCTYGCTGPGLEGCPTNGPKIPSIATGMVGALLLLLVVALGIGLFM

SEQ ID NO: 5031 - protein, 849 aa, artificial sequence
  4922 (Spacer 11) - with GGGSG linker
MVLQTQVFISLLLWISGAYGQEQLVESGGRLVTPGGSLTLSCKASGFDFSAYYMSWVRQAPGKGLEWIATIYPSSGKTYYATWVNGRFTISSDNAQNTVDLQMNSLTAADRATYFCARDSYADDGALFNIWGPGTLVTISSGGGGSGGGGSGGGGSELVLTQSPSVSAALGSPAKITCTLSSAHKTDTIDWYQQLQGEAPRYLMQVQSDGSYTKRPGVPDRFSGSSSGADRYLIIPSVQADDEADYYCGADYIGGYVFGGGTQLTVTGGGGSGPKSCDKTHTCPPCPAPMFWVLVVVGGVLACYSLLVTVAFIIFWVKRGRKKLLYIFKQPFMRPVQTTQEEDGCSCRFPEEEEGGCELRVKFSRSADAPAYQQGQNQLYNELNLGRREEYDVLDKRRGRDPEMGGKPRRKNPQEGLYNELQKDKMAEAYSEIGMKGERRRGKGHDGLYQGLSTATKDTYDALHMQALPPRSGATNFSLLKQAGDVEENPGPMLLLVTSLLLCELPHPAFLLIPRKVCNGIGIGEFKDSLSINATNIKHFKNCTSISGDLHILPVAFRGDSFTHTPPLDPQELDILKTVKEITGFLLIQAWPENRTDLHAFENLEIIRGRTKQHGQFSLAVVSLNITSLGLRSLKEISDGDVIISGNKNLCYANTINWKKLFGTSGQKTKIISNRGENSCKATGQVCHALCSPEGCWGPEPRDCVSCRNVSRGRECVDKCNLLEGEPREFVENSECIQCHPECLPQAMNITCTGRGPDNCIQCAHYIDGPHCVKTCPAGVMGENNTLVWKYADAGHVCHLCHPNCTYGCTGPGLEGCPTNGPKIPSIATGMVGALLLLLVVALGIGLFM

SEQ ID NO: 5032 - protein, 844 aa, artificial sequence
  4923 (Spacer 14) - with GGGSG linker
MVLQTQVFISLLLWISGAYGQEQLVESGGRLVTPGGSLTLSCKASGFDFSAYYMSWVRQAPGKGLEWIATIYPSSGKTYYATWVNGRFTISSDNAQNTVDLQMNSLTAADRATYFCARDSYADDGALFNIWGPGTLVTISSGGGGSGGGGSGGGGSELVLTQSPSVSAALGSPAKITCTLSSAHKTDTIDWYQQLQGEAPRYLMQVQSDGSYTKRPGVPDRFSGSSSGADRYLIIPSVQADDEADYYCGADYIGGYVFGGGTQLTVTGGGGSGPCPAPPVAGPSMFWVLVVVGGVLACYSLLVTVAFIIFWVKRGRKKLLYIFKQPFMRPVQTTQEEDGCSCRFPEEEEGGCELRVKFSRSADAPAYQQGQNQLYNELNLGRREEYDVLDKRRGRDPEMGGKPRRKNPQEGLYNELQKDKMAEAYSEIGMKGERRRGKGHDGLYQGLSTATKDTYDALHMQALPPRSGATNFSLLKQAGDVEENPGPMLLLVTSLLLCELPHPAFLLIPRKVCNGIGIGEFKDSLSINATNIKHFKNCTSISGDLHILPVAFRGDSFTHTPPLDPQELDILKTVKEITGFLLIQAWPENRTDLHAFENLEIIRGRTKQHGQFSLAVVSLNITSLGLRSLKEISDGDVIISGNKNLCYANTINWKKLFGTSGQKTKIISNRGENSCKATGQVCHALCSPEGCWGPEPRDCVSCRNVSRGRECVDKCNLLEGEPREFVENSECIQCHPECLPQAMNITCTGRGPDNCIQCAHYIDGPHCVKTCPAGVMGENNTLVWKYADAGHVCHLCHPNCTYGCTGPGLEGCPTNGPKIPSIATGMVGALLLLLVVALGIGLFM

SEQ ID NO: 5033 - protein, 861 aa, artificial sequence
  4924 (Spacer 16) - with GGGSG linker
MVLQTQVFISLLLWISGAYGQEQLVESGGRLVTPGGSLTLSCKASGFDFSAYYMSWVRQAPGKGLEWIATIYPSSGKTYYATWVNGRFTISSDNAQNTVDLQMNSLTAADRATYFCARDSYADDGALFNIWGPGTLVTISSGGGGSGGGGSGGGGSELVLTQSPSVSAALGSPAKITCTLSSAHKTDTIDWYQQLQGEAPRYLMQVQSDGSYTKRPGVPDRFSGSSSGADRYLIIPSVQADDEADYYCGADYIGGYVFGGGTQLTVTGGGGSGTVPCPVPSTPPTPSPSTPPTPSPSCCHPMFWVLVVVGGVLACYSLLVTVAFIIFWVKRGRKKLLYIFKQPFMRPVQTTQEEDGCSCRFPEEEEGGCELRVKFSRSADAPAYQQGQNQLYNELNLGRREEYDVLDKRRGRDPEMGGKPRRKNPQEGLYNELQKDKMAEAYSEIGMKGERRRGKGHDGLYQGLSTATKDTYDALHMQALPPRSGATNFSLLKQAGDVEENPGPMLLLVTSLLLCELPHPAFLLIPRKVCNGIGIGEFKDSLSINATNIKHFKNCTSISGDLHILPVAFRGDSFTHTPPLDPQELDILKTVKEITGFLLIQAWPENRTDLHAFENLEIIRGRTKQHGQFSLAVVSLNITSLGLRSLKEISDGDVIISGNKNLCYANTINWKKLFGTSGQKTKIISNRGENSCKATGQVCHALCSPEGCWGPEPRDCVSCRNVSRGRECVDKCNLLEGEPREFVENSECIQCHPECLPQAMNITCTGRGPDNCIQCAHYIDGPHCVKTCPAGVMGENNTLVWKYADAGHVCHLCHPNCTYGCTGPGLEGCPTNGPKIPSIATGMVGALLLLLVVALGIGLFM

SEQ ID NO: 5034 - protein, 843 aa, artificial sequence
  4925 (Spacer 28) - with GGGSG linker
MVLQTQVFISLLLWISGAYGQEQLVESGGRLVTPGGSLTLSCKASGFDFSAYYMSWVRQAPGKGLEWIATIYPSSGKTYYATWVNGRFTISSDNAQNTVDLQMNSLTAADRATYFCARDSYADDGALFNIWGPGTLVTISSGGGGSGGGGSGGGGSELVLTQSPSVSAALGSPAKITCTLSSAHKTDTIDWYQQLQGEAPRYLMQVQSDGSYTKRPGVPDRFSGSSSGADRYLIIPSVQADDEADYYCGADYIGGYVFGGGTQLTVTGGGGSGSVCSRDFTPPMFWVLVVVGGVLACYSLLVTVAFIIFWVKRGRKKLLYIFKQPFMRPVQTTQEEDGCSCRFPEEEEGGCELRVKFSRSADAPAYQQGQNQLYNELNLGRREEYDVLDKRRGRDPEMGGKPRRKNPQEGLYNELQKDKMAEAYSEIGMKGERRRGKGHDGLYQGLSTATKDTYDALHMQALPPRSGATNFSLLKQAGDVEENPGPMLLLVTSLLLCELPHPAFLLIPRKVCNGIGIGEFKDSLSINATNIKHFKNCTSISGDLHILPVAFRGDSFTHTPPLDPQELDILKTVKEITGFLLIQAWPENRTDLHAFENLEIIRGRTKQHGQFSLAVVSLNITSLGLRSLKEISDGDVIISGNKNLCYANTINWKKLFGTSGQKTKIISNRGENSCKATGQVCHALCSPEGCWGPEPRDCVSCRNVSRGRECVDKCNLLEGEPREFVENSECIQCHPECLPQAMNITCTGRGPDNCIQCAHYIDGPHCVKTCPAGVMGENNTLVWKYADAGHVCHLCHPNCTYGCTGPGLEGCPTNGPKIPSIATGMVGALLLLLVVALGIGLFM

SEQ ID NO: 5035 - protein, 875 aa, artificial sequence
  (Spacer 6) - with GGGSG linker
MVLQTQVFISLLLWISGAYGDIQMTQSPSSLSASVGDRVTITCRASQDVNTAVAWYQQKPGKAPKLLIYSASFLYSGVPSRFSGSRSGTDFTLTISSLQPEDFATYYCQQHYTTPPTFGQGTKVEIKGSTSGSGKPGSGEGSGEVQLVESGGGLVQPGGSLRLSCAASGFNIKDTYIHWVRQAPGKGLEWVARIYPTNGYTRYADSVKGRFTISADTSKNTAYLQMNSLRAEDTAVYYCSRWGGDGFYAMDYWGQGTLVTVSSGGGSGEPKSCDTPPPCPRCPEPKSCDTPPPCPRCPEPKSCDTPPPCPRCPAPMFWVLVVVGGVLACYSLLVTVAFIIFWVKRGRKKLLYIFKQPFMRPVQTTQEEDGCSCRFPEEEEGGCELRVKFSRSADAPAYQQGQNQLYNELNLGRREEYDVLDKRRGRDPEMGGKPRRKNPQEGLYNELQKDKMAEAYSEIGMKGERRRGKGHDGLYQGLSTATKDTYDALHMQALPPRSGATNFSLLKQAGDVEENPGPMLLLVTSLLLCELPHPAFLLIPRKVCNGIGIGEFKDSLSINATNIKHFKNCTSISGDLHILPVAFRGDSFTHTPPLDPQELDILKTVKEITGFLLIQAWPENRTDLHAFENLEIIRGRTKQHGQFSLAVVSLNITSLGLRSLKEISDGDVIISGNKNLCYANTINWKKLFGTSGQKTKIISNRGENSCKATGQVCHALCSPEGCWGPEPRDCVSCRNVSRGRECVDKCNLLEGEPREFVENSECIQCHPECLPQAMNITCTGRGPDNCIQCAHYIDGPHCVKTCPAGVMGENNTLVWKYADAGHVCHLCHPNCTYGCTGPGLEGCPTNGPKIPSIATGMVGALLLLLVVALGIGLFM

SEQ ID NO: 5036 - protein, 860 aa, artificial sequence
  (Spacer 7) - with GGGSG linker
MVLQTQVFISLLLWISGAYGDIQMTQSPSSLSASVGDRVTITCRASQDVNTAVAWYQQKPGKAPKLLIYSASFLYSGVPSRFSGSRSGTDFTLTISSLQPEDFATYYCQQHYTTPPTFGQGTKVEIKGSTSGSGKPGSGEGSGEVQLVESGGGLVQPGGSLRLSCAASGFNIKDTYIHWVRQAPGKGLEWVARIYPTNGYTRYADSVKGRFTISADTSKNTAYLQMNSLRAEDTAVYYCSRWGGDGFYAMDYWGQGTLVTVSSGGGSGEPKSCDTPPPCPRCPEPKSCDTPPPCPRCPAPMFWVLVVVGGVLACYSLLVTVAFIIFWVKRGRKKLLYIFKQPFMRPVQTTQEEDGCSCRFPEEEEGGCELRVKFSRSADAPAYQQGQNQLYNELNLGRREEYDVLDKRRGRDPEMGGKPRRKNPQEGLYNELQKDKMAEAYSEIGMKGERRRGKGHDGLYQGLSTATKDTYDALHMQALPPRSGATNFSLLKQAGDVEENPGPMLLLVTSLLLCELPHPAFLLIPRKVCNGIGIGEFKDSLSINATNIKHFKNCTSISGDLHILPVAFRGDSFTHTPPLDPQELDILKTVKEITGFLLIQAWPENRTDLHAFENLEIIRGRTKQHGQFSLAVVSLNITSLGLRSLKEISDGDVIISGNKNLCYANTINWKKLFGTSGQKTKIISNRGENSCKATGQVCHALCSPEGCWGPEPRDCVSCRNVSRGRECVDKCNLLEGEPREFVENSECIQCHPECLPQAMNITCTGRGPDNCIQCAHYIDGPHCVKTCPAGVMGENNTLVWKYADAGHVCHLCHPNCTYGCTGPGLEGCPTNGPKIPSIATGMVGALLLLLVVALGIGLFM

SEQ ID NO: 5037 - protein, 850 aa, artificial sequence
  (Spacer 8) - with GGGSG linker
MVLQTQVFISLLLWISGAYGDIQMTQSPSSLSASVGDRVTITCRASQDVNTAVAWYQQKPGKAPKLLIYSASFLYSGVPSRFSGSRSGTDFTLTISSLQPEDFATYYCQQHYTTPPTFGQGTKVEIKGSTSGSGKPGSGEGSGEVQLVESGGGLVQPGGSLRLSCAASGFNIKDTYIHWVRQAPGKGLEWVARIYPTNGYTRYADSVKGRFTISADTSKNTAYLQMNSLRAEDTAVYYCSRWGGDGFYAMDYWGQGTLVTVSSGGGSGCPRCPEPKSCDTPPPCPRCPAPMFWVLVVVGGVLACYSLLVTVAFIIFWVKRGRKKLLYIFKQPFMRPVQTTQEEDGCSCRFPEEEEGGCELRVKFSRSADAPAYQQGQNQLYNELNLGRREEYDVLDKRRGRDPEMGGKPRRKNPQEGLYNELQKDKMAEAYSEIGMKGERRRGKGHDGLYQGLSTATKDTYDALHMQALPPRSGATNFSLLKQAGDVEENPGPMLLLVTSLLLCELPHPAFLLIPRKVCNGIGIGEFKDSLSINATNIKHFKNCTSISGDLHILPVAFRGDSFTHTPPLDPQELDILKTVKEITGFLLIQAWPENRTDLHAFENLEIIRGRTKQHGQFSLAVVSLNITSLGLRSLKEISDGDVIISGNKNLCYANTINWKKLFGTSGQKTKIISNRGENSCKATGQVCHALCSPEGCWGPEPRDCVSCRNVSRGRECVDKCNLLEGEPREFVENSECIQCHPECLPQAMNITCTGRGPDNCIQCAHYIDGPHCVKTCPAGVMGENNTLVWKYADAGHVCHLCHPNCTYGCTGPGLEGCPTNGPKIPSIATGMVGALLLLLVVALGIGLFM

SEQ ID NO: 5038 - protein, 856 aa, artificial sequence
  Spacer 16) - with GGGSG linker
MVLQTQVFISLLLWISGAYGDIQMTQSPSSLSASVGDRVTITCRASQDVNTAVAWYQQKPGKAPKLLIYSASFLYSGVPSRFSGSRSGTDFTLTISSLQPEDFATYYCQQHYTTPPTFGQGTKVEIKGSTSGSGKPGSGEGSGEVQLVESGGGLVQPGGSLRLSCAASGFNIKDTYIHWVRQAPGKGLEWVARIYPTNGYTRYADSVKGRFTISADTSKNTAYLQMNSLRAEDTAVYYCSRWGGDGFYAMDYWGQGTLVTVSSGGGSGTVPCPVPSTPPTPSPSTPPTPSPSCCHPMFWVLVVVGGVLACYSLLVTVAFIIFWVKRGRKKLLYIFKQPFMRPVQTTQEEDGCSCRFPEEEEGGCELRVKFSRSADAPAYQQGQNQLYNELNLGRREEYDVLDKRRGRDPEMGGKPRRKNPQEGLYNELQKDKMAEAYSEIGMKGERRRGKGHDGLYQGLSTATKDTYDALHMQALPPRSGATNFSLLKQAGDVEENPGPMLLLVTSLLLCELPHPAFLLIPRKVCNGIGIGEFKDSLSINATNIKHFKNCTSISGDLHILPVAFRGDSFTHTPPLDPQELDILKTVKEITGFLLIQAWPENRTDLHAFENLEIIRGRTKQHGQFSLAVVSLNITSLGLRSLKEISDGDVIISGNKNLCYANTINWKKLFGTSGQKTKIISNRGENSCKATGQVCHALCSPEGCWGPEPRDCVSCRNVSRGRECVDKCNLLEGEPREFVENSECIQCHPECLPQAMNITCTGRGPDNCIQCAHYIDGPHCVKTCPAGVMGENNTLVWKYADAGHVCHLCHPNCTYGCTGPGLEGCPTNGPKIPSIATGMVGALLLLLVVALGIGLFM

SEQ ID NO: 5039 - protein, 70 aa, Artificial Sequence
  Spacer 4 + Linker
GGGGSGELKTPLGDTTHTCPRCPEPKSCDTPPPCPRCPEPKSCDTPPPCPRCPEPKSCDTPPPCPRCPAP

SEQ ID NO: 5040 - protein, 58 aa, Artificial Sequence
  Spacer 5 + Linker
GGGGSGCPRCPEPKSCDTPPPCPRCPEPKSCDTPPPCPRCPEPKSCDTPPPCPRCPAP

SEQ ID NO: 5041 - protein, 53 aa, Artificial Sequence
  Spacer 6 + Linker
GGGGSGEPKSCDTPPPCPRCPEPKSCDTPPPCPRCPEPKSCDTPPPCPRCPAP

SEQ ID NO: 5042 - protein, 14 aa, Artificial Sequence
  Spacer 1 + Linker
GGGSGKPCPPCKCP

SEQ ID NO: 5043 - protein, 12 aa, Artificial Sequence
  Spacer 15 + Linker
GGGSGPPKPKDT

SEQ ID NO: 5044 - protein, 13 aa, Artificial Sequence
  Spacer 21 + Linker
GGGGSGVPCPVPP

SEQ ID NO: 5045 - protein, 14 aa, Artificial Sequence
  Spacer 13 + Linker
GGGGSGPCPRCPAP

SEQ ID NO: 5046 - protein, 16 aa, Artificial Sequence
  Spacer 28 + Linker
GGGGSGSVCSRDFTPP

SEQ ID NO: 5047 - protein, 241 aa, Artificial Sequence
  2A2 Binder
QVQLQQSGAELVRPGASVTLSCKASGYTFSDYEMHWVIQTPVHGLEWIGAIDPETGGTAYNQKFKGKAILTADKSSSTAYMELRSLTSEDSAVYYCTGYYDYDSFTYWGQGTLVTVSAGGGGSGGGGSGGGGSDIVMTQSQKIMSTTVGDRVSITCKASQNVDAAVAWYQQKPGQSPKLLIYSASNRYTGVPDRFTGSGSGTDFTLTISNMQSEDLADYFCQQYDIYPYTFGGGTKLEIKT

SEQ ID NO: 5048 - protein, 242 aa, Artificial Sequence
  R11 Binder
QSVKESEGDLVTPAGNLTLTCTASGSDINDYPISWVRQAPGKGLEWIGFINSGGSTWYASWVKGRFTISRTSTTVDLKMTSLTTDDTATYFCARGYSTYYGDFNIWGPGTLVTISSGGGGSGGGGSGGGGSELVMTQTPSSTSGAVGGTVTINCQASQSIDSNLAWFQQKPGQPPTLLIYRASNLASGVPSRFSGSRSGTEYTLTISGVQREDAATYYCLGGVGNVSYRTSFGGGTEVVVKT

SEQ ID NO: 5049 - protein, 842 aa, Artificial Sequence
  R12/ROR1
MVLQTQVFISLLLWISGAYGQEQLVESGGRLVTPGGSLTLSCKASGFDFSAYYMSWVRQAPGKGLEWIATIYPSSGKTYYATWVNGRFTISSDNAQNTVDLQMNSLTAADRATYFCARDSYADDGALFNIWGPGTLVTISSGGGGSGGGGSGGGGSELVLTQSPSVSAALGSPAKITCTLSSAHKTDTIDWYQQLQGEAPRYLMQVQSDGSYTKRPGVPDRFSGSSSGADRYLIIPSVQADDEADYYCGADYIGGYVFGGGTQLTVTGGGGSGKPCPPCKCPMFWVLVVVGGVLACYSLLVTVAFIIFWVKRGRKKLLYIFKQPFMRPVQTTQEEDGCSCRFPEEEEGGCELRVKFSRSADAPAYQQGQNQLYNELNLGRREEYDVLDKRRGRDPEMGGKPRRKNPQEGLYNELQKDKMAEAYSEIGMKGERRRGKGHDGLYQGLSTATKDTYDALHMQALPPRSGATNFSLLKQAGDVEENPGPMLLLVTSLLLCELPHPAFLLIPRKVCNGIGIGEFKDSLSINATNIKHFKNCTSISGDLHILPVAFRGDSFTHTPPLDPQELDILKTVKEITGFLLIQAWPENRTDLHAFENLEIIRGRTKQHGQFSLAVVSLNITSLGLRSLKEISDGDVIISGNKNLCYANTINWKKLFGTSGQKTKIISNRGENSCKATGQVCHALCSPEGCWGPEPRDCVSCRNVSRGRECVDKCNLLEGEPREFVENSECIQCHPECLPQAMNITCTGRGPDNCIQCAHYIDGPHCVKTCPAGVMGENNTLVWKYADAGHVCHLCHPNCTYGCTGPGLEGCPTNGPKIPSIATGMVGALLLLLVVALGIGLFM

SEQ ID NO: 5050 - protein, 840 aa, Artificial Sequence
  R12/ROR1
MVLQTQVFISLLLWISGAYGQEQLVESGGRLVTPGGSLTLSCKASGFDFSAYYMSWVRQAPGKGLEWIATIYPSSGKTYYATWVNGRFTISSDNAQNTVDLQMNSLTAADRATYFCARDSYADDGALFNIWGPGTLVTISSGGGGSGGGGSGGGGSELVLTQSPSVSAALGSPAKITCTLSSAHKTDTIDWYQQLQGEAPRYLMQVQSDGSYTKRPGVPDRFSGSSSGADRYLIIPSVQADDEADYYCGADYIGGYVFGGGTQLTVTGGGGSGPPKPKDTMFWVLVVVGGVLACYSLLVTVAFIIFWVKRGRKKLLYIFKQPFMRPVQTTQEEDGCSCRFPEEEEGGCELRVKFSRSADAPAYQQGQNQLYNELNLGRREEYDVLDKRRGRDPEMGGKPRRKNPQEGLYNELQKDKMAEAYSEIGMKGERRRGKGHDGLYQGLSTATKDTYDALHMQALPPRSGATNFSLLKQAGDVEENPGPMLLLVTSLLLCELPHPAFLLIPRKVCNGIGIGEFKDSLSINATNIKHFKNCTSISGDLHILPVAFRGDSFTHTPPLDPQELDILKTVKEITGFLLIQAWPENRTDLHAFENLEIIRGRTKQHGQFSLAVVSLNITSLGLRSLKEISDGDVIISGNKNLCYANTINWKKLFGTSGQKTKIISNRGENSCKATGQVCHALCSPEGCWGPEPRDCVSCRNVSRGRECVDKCNLLEGEPREFVENSECIQCHPECLPQAMNITCTGRGPDNCIQCAHYIDGPHCVKTCPAGVMGENNTLVWKYADAGHVCHLCHPNCTYGCTGPGLEGCPTNGPKIPSIATGMVGALLLLLVVALGIGLFM

SEQ ID NO: 5051 - protein, 840 aa, Artificial Sequence
  R12/ROR1
MVLQTQVFISLLLWISGAYGQEQLVESGGRLVTPGGSLTLSCKASGFDFSAYYMSWVRQAPGKGLEWIATIYPSSGKTYYATWVNGRFTISSDNAQNTVDLQMNSLTAADRATYFCARDSYADDGALFNIWGPGTLVTISSGGGGSGGGGSGGGGSELVLTQSPSVSAALGSPAKITCTLSSAHKTDTIDWYQQLQGEAPRYLMQVQSDGSYTKRPGVPDRFSGSSSGADRYLIIPSVQADDEADYYCGADYIGGYVFGGGTQLTVTGGGGSGVPCPVPPMFWVLVVVGGVLACYSLLVTVAFIIFWVKRGRKKLLYIFKQPFMRPVQTTQEEDGCSCRFPEEEEGGCELRVKFSRSADAPAYQQGQNQLYNELNLGRREEYDVLDKRRGRDPEMGGKPRRKNPQEGLYNELQKDKMAEAYSEIGMKGERRRGKGHDGLYQGLSTATKDTYDALHMQALPPRSGATNFSLLKQAGDVEENPGPMLLLVTSLLLCELPHPAFLLIPRKVCNGIGIGEFKDSLSINATNIKHFKNCTSISGDLHILPVAFRGDSFTHTPPLDPQELDILKTVKEITGFLLIQAWPENRTDLHAFENLEIIRGRTKQHGQFSLAVVSLNITSLGLRSLKEISDGDVIISGNKNLCYANTINWKKLFGTSGQKTKIISNRGENSCKATGQVCHALCSPEGCWGPEPRDCVSCRNVSRGRECVDKCNLLEGEPREFVENSECIQCHPECLPQAMNITCTGRGPDNCIQCAHYIDGPHCVKTCPAGVMGENNTLVWKYADAGHVCHLCHPNCTYGCTGPGLEGCPTNGPKIPSIATGMVGALLLLLVVALGIGLFM

SEQ ID NO: 5052 - protein, 848 aa, Artificial Sequence
  FMC63/CD19
MVLQTQVFISLLLWISGAYGDIQMTQTTSSLSASLGDRVTISCRASQDISKYLNWYQQKPDGTVKLLIYHTSRLHSGVPSRFSGSGSGTDYSLTISNLEQEDIATYFCQQGNTLPYTFGGGTKLEITGSTSGSGKPGSGEGSTKGEVKLQESGPGLVAPSQSLSVTCTVSGVSLPDYGVSWIRQPPRKGLEWLGVIWGSETTYYNSALKSRLTIIKDNSKSQVFLKMNSLQTDDTAIYYCAKHYYYGGSYAMDYWGQGTSVTVSSGGGGSGEPKSCDTPPPCPRCPAPMFWVLVVVGGVLACYSLLVTVAFIIFWVKRGRKKLLYIFKQPFMRPVQTTQEEDGCSCRFPEEEEGGCELRVKFSRSADAPAYQQGQNQLYNELNLGRREEYDVLDKRRGRDPEMGGKPRRKNPQEGLYNELQKDKMAEAYSEIGMKGERRRGKGHDGLYQGLSTATKDTYDALHMQALPPRSGATNFSLLKQAGDVEENPGPMLLLVTSLLLCELPHPAFLLIPRKVCNGIGIGEFKDSLSINATNIKHFKNCTSISGDLHILPVAFRGDSFTHTPPLDPQELDILKTVKEITGFLLIQAWPENRTDLHAFENLEIIRGRTKQHGQFSLAVVSLNITSLGLRSLKEISDGDVIISGNKNLCYANTINWKKLFGTSGQKTKIISNRGENSCKATGQVCHALCSPEGCWGPEPRDCVSCRNVSRGRECVDKCNLLEGEPREFVENSECIQCHPECLPQAMNITCTGRGPDNCIQCAHYIDGPHCVKTCPAGVMGENNTLVWKYADAGHVCHLCHPNCTYGCTGPGLEGCPTNGPKIPSIATGMVGALLLLLVVALGIGLFM

SEQ ID NO: 5053 - protein, 848 aa, Artificial Sequence
  FMC63/CD19
MVLQTQVFISLLLWISGAYGDIQMTQTTSSLSASLGDRVTISCRASQDISKYLNWYQQKPDGTVKLLIYHTSRLHSGVPSRFSGSGSGTDYSLTISNLEQEDIATYFCQQGNTLPYTFGGGTKLEITGSTSGSGKPGSGEGSTKGEVKLQESGPGLVAPSQSLSVTCTVSGVSLPDYGVSWIRQPPRKGLEWLGVIWGSETTYYNSALKSRLTIIKDNSKSQVFLKMNSLQTDDTAIYYCAKHYYYGGSYAMDYWGQGTSVTVSSGGGGSGEPKSCDKTHTCPPCPAPMFWVLVVVGGVLACYSLLVTVAFIIFWVKRGRKKLLYIFKQPFMRPVQTTQEEDGCSCRFPEEEEGGCELRVKFSRSADAPAYQQGQNQLYNELNLGRREEYDVLDKRRGRDPEMGGKPRRKNPQEGLYNELQKDKMAEAYSEIGMKGERRRGKGHDGLYQGLSTATKDTYDALHMQALPPRSGATNFSLLKQAGDVEENPGPMLLLVTSLLLCELPHPAFLLIPRKVCNGIGIGEFKDSLSINATNIKHFKNCTSISGDLHILPVAFRGDSFTHTPPLDPQELDILKTVKEITGFLLIQAWPENRTDLHAFENLEIIRGRTKQHGQFSLAVVSLNITSLGLRSLKEISDGDVIISGNKNLCYANTINWKKLFGTSGQKTKIISNRGENSCKATGQVCHALCSPEGCWGPEPRDCVSCRNVSRGRECVDKCNLLEGEPREFVENSECIQCHPECLPQAMNITCTGRGPDNCIQCAHYIDGPHCVKTCPAGVMGENNTLVWKYADAGHVCHLCHPNCTYGCTGPGLEGCPTNGPKIPSIATGMVGALLLLLVVALGIGLFM

SEQ ID NO: 5054 - protein, 847 aa, Artificial Sequence
  FMC63/CD29
MVLQTQVFISLLLWISGAYGDIQMTQTTSSLSASLGDRVTISCRASQDISKYLNWYQQKPDGTVKLLIYHTSRLHSGVPSRFSGSGSGTDYSLTISNLEQEDIATYFCQQGNTLPYTFGGGTKLEITGSTSGSGKPGSGEGSTKGEVKLQESGPGLVAPSQSLSVTCTVSGVSLPDYGVSWIRQPPRKGLEWLGVIWGSETTYYNSALKSRLTIIKDNSKSQVFLKMNSLQTDDTAIYYCAKHYYYGGSYAMDYWGQGTSVTVSSGGGGSGPKSCDKTHTCPPCPAPMFWVLVVVGGVLACYSLLVTVAFIIFWVKRGRKKLLYIFKQPFMRPVQTTQEEDGCSCRFPEEEEGGCELRVKFSRSADAPAYQQGQNQLYNELNLGRREEYDVLDKRRGRDPEMGGKPRRKNPQEGLYNELQKDKMAEAYSEIGMKGERRRGKGHDGLYQGLSTATKDTYDALHMQALPPRSGATNFSLLKQAGDVEENPGPMLLLVTSLLLCELPHPAFLLIPRKVCNGIGIGEFKDSLSINATNIKHFKNCTSISGDLHILPVAFRGDSFTHTPPLDPQELDILKTVKEITGFLLIQAWPENRTDLHAFENLEIIRGRTKQHGQFSLAVVSLNITSLGLRSLKEISDGDVIISGNKNLCYANTINWKKLFGTSGQKTKIISNRGENSCKATGQVCHALCSPEGCWGPEPRDCVSCRNVSRGRECVDKCNLLEGEPREFVENSECIQCHPECLPQAMNITCTGRGPDNCIQCAHYIDGPHCVKTCPAGVMGENNTLVWKYADAGHVCHLCHPNCTYGCTGPGLEGCPTNGPKIPSIATGMVGALLLLLVVALGIGLFM

SEQ ID NO: 5055 - protein, 855 aa, Artificial Sequence; identical to SEQ ID NO: 5006
  4D5/Her2

SEQ ID NO: 5056 - protein, 845 aa, Artificial Sequence; identical to SEQ ID NO: 5007
  4D5/Her2

SEQ ID NO: 5057 - protein, 851 aa, Artificial Sequence; identical to SEQ ID NO: 5008
  4D5/Her2

SEQ ID NO: 5058 - protein, 835 aa, Artificial Sequence
  2A2/ROR1
MVLQTQVFISLLLWISGAYGQVQLQQSGAELVRPGASVTLSCKASGYTFSDYEMHWVIQTPVHGLEWIGAIDPETGGTAYNQKFKGKAILTADKSSSTAYMELRSLTSEDSAVYYCTGYYDYDSFTYWGQGTLVTVSAGGGGSGGGGSGGGGSDIVMTQSQKIMSTTVGDRVSITCKASQNVDAAVAWYQQKPGQSPKLLIYSASNRYTGVPDRFTGSGSGTDFTLTISNMQSEDLADYFCQQYDIYPYTFGGGTKLEIKTGGGGSGPCPRCPAPMFWVLVVVGGVLACYSLLVTVAFIIFWVKRGRKKLLYIFKQPFMRPVQTTQEEDGCSCRFPEEEEGGCELRVKFSRSADAPAYQQGQNQLYNELNLGRREEYDVLDKRRGRDPEMGGKPRRKNPQEGLYNELQKDKMAEAYSEIGMKGERRRGKGHDGLYQGLSTATKDTYDALHMQALPPRSGATNFSLLKQAGDVEENPGPMLLLVTSLLLCELPHPAFLLIPRKVCNGIGIGEFKDSLSINATNIKHFKNCTSISGDLHILPVAFRGDSFTHTPPLDPQELDILKTVKEITGFLLIQAWPENRTDLHAFENLEIIRGRTKQHGQFSLAVVSLNITSLGLRSLKEISDGDVIISGNKNLCYANTINWKKLFGTSGQKTKIISNRGENSCKATGQVCHALCSPEGCWGPEPRDCVSCRNVSRGRECVDKCNLLEGEPREFVENSECIQCHPECLPQAMNITCTGRGPDNCIQCAHYIDGPHCVKTCPAGVMGENNTLVWKYADAGHVCHLCHPNCTYGCTGPGLEGCPTNGPKIPSIATGMVGALLLLLVVALGIGLFM

SEQ ID NO: 5059 - protein, 834 aa, Artificial Sequence
  2A2/ROR1
MVLQTQVFISLLLWISGAYGQVQLQQSGAELVRPGASVTLSCKASGYTFSDYEMHWVIQTPVHGLEWIGAIDPETGGTAYNQKFKGKAILTADKSSSTAYMELRSLTSEDSAVYYCTGYYDYDSFTYWGQGTLVTVSAGGGGSGGGGSGGGGSDIVMTQSQKIMSTTVGDRVSITCKASQNVDAAVAWYQQKPGQSPKLLIYSASNRYTGVPDRFTGSGSGTDFTLTISNMQSEDLADYFCQQYDIYPYTFGGGTKLEIKTGGGGSGVPCPVPPMFWVLVVVGGVLACYSLLVTVAFIIFWVKRGRKKLLYIFKQPFMRPVQTTQEEDGCSCRFPEEEEGGCELRVKFSRSADAPAYQQGQNQLYNELNLGRREEYDVLDKRRGRDPEMGGKPRRKNPQEGLYNELQKDKMAEAYSEIGMKGERRRGKGHDGLYQGLSTATKDTYDALHMQALPPRSGATNFSLLKQAGDVEENPGPMLLLVTSLLLCELPHPAFLLIPRKVCNGIGIGEFKDSLSINATNIKHFKNCTSISGDLHILPVAFRGDSFTHTPPLDPQELDILKTVKEITGFLLIQAWPENRTDLHAFENLEIIRGRTKQHGQFSLAVVSLNITSLGLRSLKEISDGDVIISGNKNLCYANTINWKKLFGTSGQKTKIISNRGENSCKATGQVCHALCSPEGCWGPEPRDCVSCRNVSRGRECVDKCNLLEGEPREFVENSECIQCHPECLPQAMNITCTGRGPDNCIQCAHYIDGPHCVKTCPAGVMGENNTLVWKYADAGHVCHLCHPNCTYGCTGPGLEGCPTNGPKIPSIATGMVGALLLLLVVALGIGLFM

SEQ ID NO: 5060 - protein, 837 aa, Artificial Sequence
  2A2/ROR1
MVLQTQVFISLLLWISGAYGQVQLQQSGAELVRPGASVTLSCKASGYTFSDYEMHWVIQTPVHGLEWIGAIDPETGGTAYNQKFKGKAILTADKSSSTAYMELRSLTSEDSAVYYCTGYYDYDSFTYWGQGTLVTVSAGGGGSGGGGSGGGGSDIVMTQSQKIMSTTVGDRVSITCKASQNVDAAVAWYQQKPGQSPKLLIYSASNRYTGVPDRFTGSGSGTDFTLTISNMQSEDLADYFCQQYDIYPYTFGGGTKLEIKTGGGGSGSVCSRDFTPPMFWVLVVVGGVLACYSLLVTVAFIIFWVKRGRKKLLYIFKQPFMRPVQTTQEEDGCSCRFPEEEEGGCELRVKFSRSADAPAYQQGQNQLYNELNLGRREEYDVLDKRRGRDPEMGGKPRRKNPQEGLYNELQKDKMAEAYSEIGMKGERRRGKGHDGLYQGLSTATKDTYDALHMQALPPRSGATNFSLLKQAGDVEENPGPMLLLVTSLLLCELPHPAFLLIPRKVCNGIGIGEFKDSLSINATNIKHFKNCTSISGDLHILPVAFRGDSFTHTPPLDPQELDILKTVKEITGFLLIQAWPENRTDLHAFENLEIIRGRTKQHGQFSLAVVSLNITSLGLRSLKEISDGDVIISGNKNLCYANTINWKKLFGTSGQKTKIISNRGENSCKATGQVCHALCSPEGCWGPEPRDCVSCRNVSRGRECVDKCNLLEGEPREFVENSECIQCHPECLPQAMNITCTGRGPDNCIQCAHYIDGPHCVKTCPAGVMGENNTLVWKYADAGHVCHLCHPNCTYGCTGPGLEGCPTNGPKIPSIATGMVGALLLLLVVALGIGLFM

SEQ ID NO: 5061 - protein, 892 aa, Artificial Sequence
  R11/ROR1
MVLQTQVFISLLLWISGAYGQSVKESEGDLVTPAGNLTLTCTASGSDINDYPISWVRQAPGKGLEWIGFINSGGSTWYASWVKGRFTISRTSTTVDLKMTSLTTDDTATYFCARGYSTYYGDFNIWGPGTLVTISSGGGGSGGGGSGGGGSELVMTQTPSSTSGAVGGTVTINCQASQSIDSNLAWFQQKPGQPPTLLIYRASNLASGVPSRFSGSRSGTEYTLTISGVQREDAATYYCLGGVGNVSYRTSFGGGTEVVVKTGGGGSGELKTPLGDTTHTCPRCPEPKSCDTPPPCPRCPEPKSCDTPPPCPRCPEPKSCDTPPPCPRCPAPMFWVLVVVGGVLACYSLLVTVAFIIFWVKRGRKKLLYIFKQPFMRPVQTTQEEDGCSCRFPEEEEGGCELRVKFSRSADAPAYQQGQNQLYNELNLGRREEYDVLDKRRGRDPEMGGKPRRKNPQEGLYNELQKDKMAEAYSEIGMKGERRRGKGHDGLYQGLSTATKDTYDALHMQALPPRSGATNFSLLKQAGDVEENPGPMLLLVTSLLLCELPHPAFLLIPRKVCNGIGIGEFKDSLSINATNIKHFKNCTSISGDLHILPVAFRGDSFTHTPPLDPQELDILKTVKEITGFLLIQAWPENRTDLHAFENLEIIRGRTKQHGQFSLAVVSLNITSLGLRSLKEISDGDVIISGNKNLCYANTINWKKLFGTSGQKTKIISNRGENSCKATGQVCHALCSPEGCWGPEPRDCVSCRNVSRGRECVDKCNLLEGEPREFVENSECIQCHPECLPQAMNITCTGRGPDNCIQCAHYIDGPHCVKTCPAGVMGENNTLVWKYADAGHVCHLCHPNCTYGCTGPGLEGCPTNGPKIPSIATGMVGALLLLLVVALGIGLFM

SEQ ID NO: 5062 - protein, 880 aa, Artificial Sequence
  R11/ROR1
MVLQTQVFISLLLWISGAYGQSVKESEGDLVTPAGNLTLTCTASGSDINDYPISWVRQAPGKGLEWIGFINSGGSTWYASWVKGRFTISRTSTTVDLKMTSLTTDDTATYFCARGYSTYYGDFNIWGPGTLVTISSGGGGSGGGGSGGGGSELVMTQTPSSTSGAVGGTVTINCQASQSIDSNLAWFQQKPGQPPTLLIYRASNLASGVPSRFSGSRSGTEYTLTISGVQREDAATYYCLGGVGNVSYRTSFGGGTEVVVKTGGGGSGCPRCPEPKSCDTPPPCPRCPEPKSCDTPPPCPRCPEPKSCDTPPPCPRCPAPMFWVLVVVGGVLACYSLLVTVAFIIFWVKRGRKKLLYIFKQPFMRPVQTTQEEDGCSCRFPEEEEGGCELRVKFSRSADAPAYQQGQNQLYNELNLGRREEYDVLDKRRGRDPEMGGKPRRKNPQEGLYNELQKDKMAEAYSEIGMKGERRRGKGHDGLYQGLSTATKDTYDALHMQALPPRSGATNFSLLKQAGDVEENPGPMLLLVTSLLLCELPHPAFLLIPRKVCNGIGIGEFKDSLSINATNIKHFKNCTSISGDLHILPVAFRGDSFTHTPPLDPQELDILKTVKEITGFLLIQAWPENRTDLHAFENLEIIRGRTKQHGQFSLAVVSLNITSLGLRSLKEISDGDVIISGNKNLCYANTINWKKLFGTSGQKTKIISNRGENSCKATGQVCHALCSPEGCWGPEPRDCVSCRNVSRGRECVDKCNLLEGEPREFVENSECIQCHPECLPQAMNITCTGRGPDNCIQCAHYIDGPHCVKTCPAGVMGENNTLVWKYADAGHVCHLCHPNCTYGCTGPGLEGCPTNGPKIPSIATGMVGALLLLLVVALGIGLFM

SEQ ID NO: 5063 - protein, 875 aa, Artificial Sequence
  R11/ROR1
MVLQTQVFISLLLWISGAYGQSVKESEGDLVTPAGNLTLTCTASGSDINDYPISWVRQAPGKGLEWIGFINSGGSTWYASWVKGRFTISRTSTTVDLKMTSLTTDDTATYFCARGYSTYYGDFNIWGPGTLVTISSGGGGSGGGGSGGGGSELVMTQTPSSTSGAVGGTVTINCQASQSIDSNLAWFQQKPGQPPTLLIYRASNLASGVPSRFSGSRSGTEYTLTISGVQREDAATYYCLGGVGNVSYRTSFGGGTEVVVKTGGGGSGEPKSCDTPPPCPRCPEPKSCDTPPPCPRCPEPKSCDTPPPCPRCPAPMFWVLVVVGGVLACYSLLVTVAFIIFWVKRGRKKLLYIFKQPFMRPVQTTQEEDGCSCRFPEEEEGGCELRVKFSRSADAPAYQQGQNQLYNELNLGRREEYDVLDKRRGRDPEMGGKPRRKNPQEGLYNELQKDKMAEAYSEIGMKGERRRGKGHDGLYQGLSTATKDTYDALHMQALPPRSGATNFSLLKQAGDVEENPGPMLLLVTSLLLCELPHPAFLLIPRKVCNGIGIGEFKDSLSINATNIKHFKNCTSISGDLHILPVAFRGDSFTHTPPLDPQELDILKTVKEITGFLLIQAWPENRTDLHAFENLEIIRGRTKQHGQFSLAVVSLNITSLGLRSLKEISDGDVIISGNKNLCYANTINWKKLFGTSGQKTKIISNRGENSCKATGQVCHALCSPEGCWGPEPRDCVSCRNVSRGRECVDKCNLLEGEPREFVENSECIQCHPECLPQAMNITCTGRGPDNCIQCAHYIDGPHCVKTCPAGVMGENNTLVWKYADAGHVCHLCHPNCTYGCTGPGLEGCPTNGPKIPSIATGMVGALLLLLVVALGIGLFM

SEQ ID NO: 5064 - protein, 335 aa, Artificial Sequence
  EGFRt with no signal peptide
RKVCNGIGIGEFKDSLSINATNIKHFKNCTSISGDLHILPVAFRGDSFTHTPPLDPQELDILKTVKEITGFLLIQAWPENRTDLHAFENLEIIRGRTKQHGQFSLAVVSLNITSLGLRSLKEISDGDVIISGNKNLCYANTINWKKLFGTSGQKTKIISNRGENSCKATGQVCHALCSPEGCWGPEPRDCVSCRNVSRGRECVDKCNLLEGEPREFVENSECIQCHPECLPQAMNITCTGRGPDNCIQCAHYIDGPHCVKTCPAGVMGENNTLVWKYADAGHVCHLCHPNCTYGCTGPGLEGCPTNGPKIPSIATGMVGALLLLLVVALGIGLFM

SEQ ID NO: 5065 - protein, 849 aa, Artificial Sequence; identical to SEQ ID NO: 5031
  R12 spacer 11

SEQ ID NO: 5066 - protein, 841 aa, Artificial Sequence
  R12 spacer 13
MVLQTQVFISLLLWISGAYGQEQLVESGGRLVTPGGSLTLSCKASGFDFSAYYMSWVRQAPGKGLEWIATIYPSSGKTYYATWVNGRFTISSDNAQNTVDLQMNSLTAADRATYFCARDSYADDGALFNIWGPGTLVTISSGGGGSGGGGSGGGGSELVLTQSPSVSAALGSPAKITCTLSSAHKTDTIDWYQQLQGEAPRYLMQVQSDGSYTKRPGVPDRFSGSSSGADRYLIIPSVQADDEADYYCGADYIGGYVFGGGTQLTVTGGGGSGPCPRCPAPMFWVLVVVGGVLACYSLLVTVAFIIFWVKRGRKKLLYIFKQPFMRPVQTTQEEDGCSCRFPEEEEGGCELRVKFSRSADAPAYQQGQNQLYNELNLGRREEYDVLDKRRGRDPEMGGKPRRKNPQEGLYNELQKDKMAEAYSEIGMKGERRRGKGHDGLYQGLSTATKDTYDALHMQALPPRSGATNFSLLKQAGDVEENPGPMLLLVTSLLLCELPHPAFLLIPRKVCNGIGIGEFKDSLSINATNIKHFKNCTSISGDLHILPVAFRGDSFTHTPPLDPQELDILKTVKEITGFLLIQAWPENRTDLHAFENLEIIRGRTKQHGQFSLAVVSLNITSLGLRSLKEISDGDVIISGNKNLCYANTINWKKLFGTSGQKTKIISNRGENSCKATGQVCHALCSPEGCWGPEPRDCVSCRNVSRGRECVDKCNLLEGEPREFVENSECIQCHPECLPQAMNITCTGRGPDNCIQCAHYIDGPHCVKTCPAGVMGENNTLVWKYADAGHVCHLCHPNCTYGCTGPGLEGCPTNGPKIPSIATGMVGALLLLLVVALGIGLFM

SEQ ID NO: 5067 - protein, 844 aa, Artificial Sequence; identical to SEQ ID NO: 5032
  R12 spacer 14

SEQ ID NO: 5068 - protein, 844 aa, Artificial Sequence
  R12 spacer 2
MVLQTQVFISLLLWISGAYGQEQLVESGGRLVTPGGSLTLSCKASGFDFSAYYMSWVRQAPGKGLEWIATIYPSSGKTYYATWVNGRFTISSDNAQNTVDLQMNSLTAADRATYFCARDSYADDGALFNIWGPGTLVTISSGGGGSGGGGSGGGGSELVLTQSPSVSAALGSPAKITCTLSSAHKTDTIDWYQQLQGEAPRYLMQVQSDGSYTKRPGVPDRFSGSSSGADRYLIIPSVQADDEADYYCGADYIGGYVFGGGTQLTVTGGGGSGKPCPPCKCPAPMFWVLVVVGGVLACYSLLVTVAFIIFWVKRGRKKLLYIFKQPFMRPVQTTQEEDGCSCRFPEEEEGGCELRVKFSRSADAPAYQQGQNQLYNELNLGRREEYDVLDKRRGRDPEMGGKPRRKNPQEGLYNELQKDKMAEAYSEIGMKGERRRGKGHDGLYQGLSTATKDTYDALHMQALPPRSGATNFSLLKQAGDVEENPGPMLLLVTSLLLCELPHPAFLLIPRKVCNGIGIGEFKDSLSINATNIKHFKNCTSISGDLHILPVAFRGDSFTHTPPLDPQELDILKTVKEITGFLLIQAWPENRTDLHAFENLEIIRGRTKQHGQFSLAVVSLNITSLGLRSLKEISDGDVIISGNKNLCYANTINWKKLFGTSGQKTKIISNRGENSCKATGQVCHALCSPEGCWGPEPRDCVSCRNVSRGRECVDKCNLLEGEPREFVENSECIQCHPECLPQAMNITCTGRGPDNCIQCAHYIDGPHCVKTCPAGVMGENNTLVWKYADAGHVCHLCHPNCTYGCTGPGLEGCPTNGPKIPSIATGMVGALLLLLVVALGIGLFM

SEQ ID NO: 5069 - protein, 847 aa, Artificial Sequence
  R12 spacer 3
MVLQTQVFISLLLWISGAYGQEQLVESGGRLVTPGGSLTLSCKASGFDFSAYYMSWVRQAPGKGLEWIATIYPSSGKTYYATWVNGRFTISSDNAQNTVDLQMNSLTAADRATYFCARDSYADDGALFNIWGPGTLVTISSGGGGSGGGGSGGGGSELVLTQSPSVSAALGSPAKITCTLSSAHKTDTIDWYQQLQGEAPRYLMQVQSDGSYTKRPGVPDRFSGSSSGADRYLIIPSVQADDEADYYCGADYIGGYVFGGGTQLTVTGGGGSGGPTIKPCPPKCPAPMFWVLVVVGGVLACYSLLVTVAFIIFWVKRGRKKLLYIFKQPFMRPVQTTQEEDGCSCRFPEEEEGGCELRVKFSRSADAPAYQQGQNQLYNELNLGRREEYDVLDKRRGRDPEMGGKPRRKNPQEGLYNELQKDKMAEAYSEIGMKGERRRGKGHDGLYQGLSTATKDTYDALHMQALPPRSGATNFSLLKQAGDVEENPGPMLLLVTSLLLCELPHPAFLLIPRKVCNGIGIGEFKDSLSINATNIKHFKNCTSISGDLHILPVAFRGDSFTHTPPLDPQELDILKTVKEITGFLLIQAWPENRTDLHAFENLEIIRGRTKQHGQFSLAVVSLNITSLGLRSLKEISDGDVIISGNKNLCYANTINWKKLFGTSGQKTKIISNRGENSCKATGQVCHALCSPEGCWGPEPRDCVSCRNVSRGRECVDKCNLLEGEPREFVENSECIQCHPECLPQAMNITCTGRGPDNCIQCAHYIDGPHCVKTCPAGVMGENNTLVWKYADAGHVCHLCHPNCTYGCTGPGLEGCPTNGPKIPSIATGMVGALLLLLVVALGIGLFM

SEQ ID NO: 5070 - protein, 840 aa, Artificial Sequence; identical to SEQ ID NO: 4873
  R12 Short IgG4 Hinge

SEQ ID NO: 5071 - protein, 845 aa, Artificial Sequence; identical to SEQ ID NO: 5026
  R12 Short IgG4 Hinge with optional linker

SEQ ID NO: 5072 - protein, 837 aa, Artificial Sequence
  R12 Spacer 1, without optional linker
MVLQTQVFISLLLWISGAYGQEQLVESGGRLVTPGGSLTLSCKASGFDFSAYYMSWVRQAPGKGLEWIATIYPSSGKTYYATWVNGRFTISSDNAQNTVDLQMNSLTAADRATYFCARDSYADDGALFNIWGPGTLVTISSGGGGSGGGGSGGGGSELVLTQSPSVSAALGSPAKITCTLSSAHKTDTIDWYQQLQGEAPRYLMQVQSDGSYTKRPGVPDRFSGSSSGADRYLIIPSVQADDEADYYCGADYIGGYVFGGGTQLTVTGKPCPPCKCPMFWVLVVVGGVLACYSLLVTVAFIIFWVKRGRKKLLYIFKQPFMRPVQTTQEEDGCSCRFPEEEEGGCELRVKFSRSADAPAYQQGQNQLYNELNLGRREEYDVLDKRRGRDPEMGGKPRRKNPQEGLYNELQKDKMAEAYSEIGMKGERRRGKGHDGLYQGLSTATKDTYDALHMQALPPRSGATNFSLLKQAGDVEENPGPMLLLVTSLLLCELPHPAFLLIPRKVCNGIGIGEFKDSLSINATNIKHFKNCTSISGDLHILPVAFRGDSFTHTPPLDPQELDILKTVKEITGFLLIQAWPENRTDLHAFENLEIIRGRTKQHGQFSLAVVSLNITSLGLRSLKEISDGDVIISGNKNLCYANTINWKKLFGTSGQKTKIISNRGENSCKATGQVCHALCSPEGCWGPEPRDCVSCRNVSRGRECVDKCNLLEGEPREFVENSECIQCHPECLPQAMNITCTGRGPDNCIQCAHYIDGPHCVKTCPAGVMGENNTLVWKYADAGHVCHLCHPNCTYGCTGPGLEGCPTNGPKIPSIATGMVGALLLLLVVALGIGLFM

SEQ ID NO: 5073 - protein, 844 aa, Artificial Sequence; identical to SEQ ID NO: 4922
  R12 Spacer 11, without optional

SEQ ID NO: 5074 - protein, 836 aa, Artificial Sequence
  R12 Spacer 13, without optional linker
MVLQTQVFISLLLWISGAYGQEQLVESGGRLVTPGGSLTLSCKASGFDFSAYYMSWVRQAPGKGLEWIATIYPSSGKTYYATWVNGRFTISSDNAQNTVDLQMNSLTAADRATYFCARDSYADDGALFNIWGPGTLVTISSGGGGSGGGGSGGGGSELVLTQSPSVSAALGSPAKITCTLSSAHKTDTIDWYQQLQGEAPRYLMQVQSDGSYTKRPGVPDRFSGSSSGADRYLIIPSVQADDEADYYCGADYIGGYVFGGGTQLTVTGPCPRCPAPMFWVLVVVGGVLACYSLLVTVAFIIFWVKRGRKKLLYIFKQPFMRPVQTTQEEDGCSCRFPEEEEGGCELRVKFSRSADAPAYQQGQNQLYNELNLGRREEYDVLDKRRGRDPEMGGKPRRKNPQEGLYNELQKDKMAEAYSEIGMKGERRRGKGHDGLYQGLSTATKDTYDALHMQALPPRSGATNFSLLKQAGDVEENPGPMLLLVTSLLLCELPHPAFLLIPRKVCNGIGIGEFKDSLSINATNIKHFKNCTSISGDLHILPVAFRGDSFTHTPPLDPQELDILKTVKEITGFLLIQAWPENRTDLHAFENLEIIRGRTKQHGQFSLAVVSLNITSLGLRSLKEISDGDVIISGNKNLCYANTINWKKLFGTSGQKTKIISNRGENSCKATGQVCHALCSPEGCWGPEPRDCVSCRNVSRGRECVDKCNLLEGEPREFVENSECIQCHPECLPQAMNITCTGRGPDNCIQCAHYIDGPHCVKTCPAGVMGENNTLVWKYADAGHVCHLCHPNCTYGCTGPGLEGCPTNGPKIPSIATGMVGALLLLLVVALGIGLFM

SEQ ID NO: 5075 - protein, 839 aa, Artificial Sequence; identical to SEQ ID NO: 4923
  R12 Spacer 14, without optional linker

SEQ ID NO: 5076 - protein, 837 aa, Artificial Sequence
  Cd19 CAR Short IgG4 Hinge
MVLQTQVFISLLLWISGAYGDIQMTQTTSSLSASLGDRVTISCRASQDISKYLNWYQQKPDGTVKLLIYHTSRLHSGVPSRFSGSGSGTDYSLTISNLEQEDIATYFCQQGNTLPYTFGGGTKLEITGSTSGSGKPGSGEGSTKGEVKLQESGPGLVAPSQSLSVTCTVSGVSLPDYGVSWIRQPPRKGLEWLGVIWGSETTYYNSALKSRLTIIKDNSKSQVFLKMNSLQTDDTAIYYCAKHYYYGGSYAMDYWGQGTSVTVSSESKYGPPCPPCPMFWVLVVVGGVLACYSLLVTVAFIIFWVKRGRKKLLYIFKQPFMRPVQTTQEEDGCSCRFPEEEEGGCELRVKFSRSADAPAYQQGQNQLYNELNLGRREEYDVLDKRRGRDPEMGGKPRRKNPQEGLYNELQKDKMAEAYSEIGMKGERRRGKGHDGLYQGLSTATKDTYDALHMQALPPRSGATNFSLLKQAGDVEENPGPMLLLVTSLLLCELPHPAFLLIPRKVCNGIGIGEFKDSLSINATNIKHFKNCTSISGDLHILPVAFRGDSFTHTPPLDPQELDILKTVKEITGFLLIQAWPENRTDLHAFENLEIIRGRTKQHGQFSLAVVSLNITSLGLRSLKEISDGDVIISGNKNLCYANTINWKKLFGTSGQKTKIISNRGENSCKATGQVCHALCSPEGCWGPEPRDCVSCRNVSRGRECVDKCNLLEGEPREFVENSECIQCHPECLPQAMNITCTGRGPDNCIQCAHYIDGPHCVKTCPAGVMGENNTLVWKYADAGHVCHLCHPNCTYGCTGPGLEGCPTNGPKIPSIATGMVGALLLLLVVALGIGLFM

SEQ ID NO: 5077 - protein, 863 aa, Artificial Sequence
  CD19 CAR and Spacer 7
MVLQTQVFISLLLWISGAYGDIQMTQTTSSLSASLGDRVTISCRASQDISKYLNWYQQKPDGTVKLLIYHTSRLHSGVPSRFSGSGSGTDYSLTISNLEQEDIATYFCQQGNTLPYTFGGGTKLEITGSTSGSGKPGSGEGSTKGEVKLQESGPGLVAPSQSLSVTCTVSGVSLPDYGVSWIRQPPRKGLEWLGVIWGSETTYYNSALKSRLTIIKDNSKSQVFLKMNSLQTDDTAIYYCAKHYYYGGSYAMDYWGQGTSVTVSSGGGGSGEPKSCDTPPPCPRCPEPKSCDTPPPCPRCPAPMFWVLVVVGGVLACYSLLVTVAFIIFWVKRGRKKLLYIFKQPFMRPVQTTQEEDGCSCRFPEEEEGGCELRVKFSRSADAPAYQQGQNQLYNELNLGRREEYDVLDKRRGRDPEMGGKPRRKNPQEGLYNELQKDKMAEAYSEIGMKGERRRGKGHDGLYQGLSTATKDTYDALHMQALPPRSGATNFSLLKQAGDVEENPGPMLLLVTSLLLCELPHPAFLLIPRKVCNGIGIGEFKDSLSINATNIKHFKNCTSISGDLHILPVAFRGDSFTHTPPLDPQELDILKTVKEITGFLLIQAWPENRTDLHAFENLEIIRGRTKQHGQFSLAVVSLNITSLGLRSLKEISDGDVIISGNKNLCYANTINWKKLFGTSGQKTKIISNRGENSCKATGQVCHALCSPEGCWGPEPRDCVSCRNVSRGRECVDKCNLLEGEPREFVENSECIQCHPECLPQAMNITCTGRGPDNCIQCAHYIDGPHCVKTCPAGVMGENNTLVWKYADAGHVCHLCHPNCTYGCTGPGLEGCPTNGPKIPSIATGMVGALLLLLVVALGIGLFM

SEQ ID NO: 5078 - protein, 853 aa, Artificial Sequence
  CD19 CAR and Spacer 8
MVLQTQVFISLLLWISGAYGDIQMTQTTSSLSASLGDRVTISCRASQDISKYLNWYQQKPDGTVKLLIYHTSRLHSGVPSRFSGSGSGTDYSLTISNLEQEDIATYFCQQGNTLPYTFGGGTKLEITGSTSGSGKPGSGEGSTKGEVKLQESGPGLVAPSQSLSVTCTVSGVSLPDYGVSWIRQPPRKGLEWLGVIWGSETTYYNSALKSRLTIIKDNSKSQVFLKMNSLQTDDTAIYYCAKHYYYGGSYAMDYWGQGTSVTVSSGGGGSGCPRCPEPKSCDTPPPCPRCPAPMFWVLVVVGGVLACYSLLVTVAFIIFWVKRGRKKLLYIFKQPFMRPVQTTQEEDGCSCRFPEEEEGGCELRVKFSRSADAPAYQQGQNQLYNELNLGRREEYDVLDKRRGRDPEMGGKPRRKNPQEGLYNELQKDKMAEAYSEIGMKGERRRGKGHDGLYQGLSTATKDTYDALHMQALPPRSGATNFSLLKQAGDVEENPGPMLLLVTSLLLCELPHPAFLLIPRKVCNGIGIGEFKDSLSINATNIKHFKNCTSISGDLHILPVAFRGDSFTHTPPLDPQELDILKTVKEITGFLLIQAWPENRTDLHAFENLEIIRGRTKQHGQFSLAVVSLNITSLGLRSLKEISDGDVIISGNKNLCYANTINWKKLFGTSGQKTKIISNRGENSCKATGQVCHALCSPEGCWGPEPRDCVSCRNVSRGRECVDKCNLLEGEPREFVENSECIQCHPECLPQAMNITCTGRGPDNCIQCAHYIDGPHCVKTCPAGVMGENNTLVWKYADAGHVCHLCHPNCTYGCTGPGLEGCPTNGPKIPSIATGMVGALLLLLVVALGIGLFM

SEQ ID NO: 5079 - protein, 848 aa, Artificial Sequence; identical to SEQ ID NO: 5052
  CD19 CAR and Spacer 9

SEQ ID NO: 5080 - protein, 848 aa, Artificial Sequence; identical to SEQ ID NO: 5053
  CD19 CAR and Spacer 10

SEQ ID NO: 5081 - protein, 847 aa, Artificial Sequence; identical to SEQ ID NO: 5054
  CD19 CAR and Spacer 11

SEQ ID NO: 5082 - protein, 842 aa, Artificial Sequence
  CD19 CAR and Spacer 14
MVLQTQVFISLLLWISGAYGDIQMTQTTSSLSASLGDRVTISCRASQDISKYLNWYQQKPDGTVKLLIYHTSRLHSGVPSRFSGSGSGTDYSLTISNLEQEDIATYFCQQGNTLPYTFGGGTKLEITGSTSGSGKPGSGEGSTKGEVKLQESGPGLVAPSQSLSVTCTVSGVSLPDYGVSWIRQPPRKGLEWLGVIWGSETTYYNSALKSRLTIIKDNSKSQVFLKMNSLQTDDTAIYYCAKHYYYGGSYAMDYWGQGTSVTVSSGGGGSGPCPAPPVAGPSMFWVLVVVGGVLACYSLLVTVAFIIFWVKRGRKKLLYIFKQPFMRPVQTTQEEDGCSCRFPEEEEGGCELRVKFSRSADAPAYQQGQNQLYNELNLGRREEYDVLDKRRGRDPEMGGKPRRKNPQEGLYNELQKDKMAEAYSEIGMKGERRRGKGHDGLYQGLSTATKDTYDALHMQALPPRSGATNFSLLKQAGDVEENPGPMLLLVTSLLLCELPHPAFLLIPRKVCNGIGIGEFKDSLSINATNIKHFKNCTSISGDLHILPVAFRGDSFTHTPPLDPQELDILKTVKEITGFLLIQAWPENRTDLHAFENLEIIRGRTKQHGQFSLAVVSLNITSLGLRSLKEISDGDVIISGNKNLCYANTINWKKLFGTSGQKTKIISNRGENSCKATGQVCHALCSPEGCWGPEPRDCVSCRNVSRGRECVDKCNLLEGEPREFVENSECIQCHPECLPQAMNITCTGRGPDNCIQCAHYIDGPHCVKTCPAGVMGENNTLVWKYADAGHVCHLCHPNCTYGCTGPGLEGCPTNGPKIPSIATGMVGALLLLLVVALGIGLFM

SEQ ID NO: 5083 - protein, 859 aa, Artificial Sequence
  CD19 CAR and Spacer 16
MVLQTQVFISLLLWISGAYGDIQMTQTTSSLSASLGDRVTISCRASQDISKYLNWYQQKPDGTVKLLIYHTSRLHSGVPSRFSGSGSGTDYSLTISNLEQEDIATYFCQQGNTLPYTFGGGTKLEITGSTSGSGKPGSGEGSTKGEVKLQESGPGLVAPSQSLSVTCTVSGVSLPDYGVSWIRQPPRKGLEWLGVIWGSETTYYNSALKSRLTIIKDNSKSQVFLKMNSLQTDDTAIYYCAKHYYYGGSYAMDYWGQGTSVTVSSGGGGSGTVPCPVPSTPPTPSPSTPPTPSPSCCHPMFWVLVVVGGVLACYSLLVTVAFIIFWVKRGRKKLLYIFKQPFMRPVQTTQEEDGCSCRFPEEEEGGCELRVKFSRSADAPAYQQGQNQLYNELNLGRREEYDVLDKRRGRDPEMGGKPRRKNPQEGLYNELQKDKMAEAYSEIGMKGERRRGKGHDGLYQGLSTATKDTYDALHMQALPPRSGATNFSLLKQAGDVEENPGPMLLLVTSLLLCELPHPAFLLIPRKVCNGIGIGEFKDSLSINATNIKHFKNCTSISGDLHILPVAFRGDSFTHTPPLDPQELDILKTVKEITGFLLIQAWPENRTDLHAFENLEIIRGRTKQHGQFSLAVVSLNITSLGLRSLKEISDGDVIISGNKNLCYANTINWKKLFGTSGQKTKIISNRGENSCKATGQVCHALCSPEGCWGPEPRDCVSCRNVSRGRECVDKCNLLEGEPREFVENSECIQCHPECLPQAMNITCTGRGPDNCIQCAHYIDGPHCVKTCPAGVMGENNTLVWKYADAGHVCHLCHPNCTYGCTGPGLEGCPTNGPKIPSIATGMVGALLLLLVVALGIGLFM

SEQ ID NO: 5084 - protein, 841 aa, Artificial Sequence
  CD19 CAR and Spacer  28
MVLQTQVFISLLLWISGAYGDIQMTQTTSSLSASLGDRVTISCRASQDISKYLNWYQQKPDGTVKLLIYHTSRLHSGVPSRFSGSGSGTDYSLTISNLEQEDIATYFCQQGNTLPYTFGGGTKLEITGSTSGSGKPGSGEGSTKGEVKLQESGPGLVAPSQSLSVTCTVSGVSLPDYGVSWIRQPPRKGLEWLGVIWGSETTYYNSALKSRLTIIKDNSKSQVFLKMNSLQTDDTAIYYCAKHYYYGGSYAMDYWGQGTSVTVSSGGGGSGSVCSRDFTPPMFWVLVVVGGVLACYSLLVTVAFIIFWVKRGRKKLLYIFKQPFMRPVQTTQEEDGCSCRFPEEEEGGCELRVKFSRSADAPAYQQGQNQLYNELNLGRREEYDVLDKRRGRDPEMGGKPRRKNPQEGLYNELQKDKMAEAYSEIGMKGERRRGKGHDGLYQGLSTATKDTYDALHMQALPPRSGATNFSLLKQAGDVEENPGPMLLLVTSLLLCELPHPAFLLIPRKVCNGIGIGEFKDSLSINATNIKHFKNCTSISGDLHILPVAFRGDSFTHTPPLDPQELDILKTVKEITGFLLIQAWPENRTDLHAFENLEIIRGRTKQHGQFSLAVVSLNITSLGLRSLKEISDGDVIISGNKNLCYANTINWKKLFGTSGQKTKIISNRGENSCKATGQVCHALCSPEGCWGPEPRDCVSCRNVSRGRECVDKCNLLEGEPREFVENSECIQCHPECLPQAMNITCTGRGPDNCIQCAHYIDGPHCVKTCPAGVMGENNTLVWKYADAGHVCHLCHPNCTYGCTGPGLEGCPTNGPKIPSIATGMVGALLLLLVVALGIGLFM

SEQ ID NO: 5085 - protein, 840 aa, Artificial Sequence
  CD19 CAR and Spacer 1
MVLQTQVFISLLLWISGAYGDIQMTQTTSSLSASLGDRVTISCRASQDISKYLNWYQQKPDGTVKLLIYHTSRLHSGVPSRFSGSGSGTDYSLTISNLEQEDIATYFCQQGNTLPYTFGGGTKLEITGSTSGSGKPGSGEGSTKGEVKLQESGPGLVAPSQSLSVTCTVSGVSLPDYGVSWIRQPPRKGLEWLGVIWGSETTYYNSALKSRLTIIKDNSKSQVFLKMNSLQTDDTAIYYCAKHYYYGGSYAMDYWGQGTSVTVSSGGGGSGKPCPPCKCPMFWVLVVVGGVLACYSLLVTVAFIIFWVKRGRKKLLYIFKQPFMRPVQTTQEEDGCSCRFPEEEEGGCELRVKFSRSADAPAYQQGQNQLYNELNLGRREEYDVLDKRRGRDPEMGGKPRRKNPQEGLYNELQKDKMAEAYSEIGMKGERRRGKGHDGLYQGLSTATKDTYDALHMQALPPRSGATNFSLLKQAGDVEENPGPMLLLVTSLLLCELPHPAFLLIPRKVCNGIGIGEFKDSLSINATNIKHFKNCTSISGDLHILPVAFRGDSFTHTPPLDPQELDILKTVKEITGFLLIQAWPENRTDLHAFENLEIIRGRTKQHGQFSLAVVSLNITSLGLRSLKEISDGDVIISGNKNLCYANTINWKKLFGTSGQKTKIISNRGENSCKATGQVCHALCSPEGCWGPEPRDCVSCRNVSRGRECVDKCNLLEGEPREFVENSECIQCHPECLPQAMNITCTGRGPDNCIQCAHYIDGPHCVKTCPAGVMGENNTLVWKYADAGHVCHLCHPNCTYGCTGPGLEGCPTNGPKIPSIATGMVGALLLLLVVALGIGLFM

SEQ ID NO: 5086 - protein, 842 aa, Artificial Sequence
  CD19 CAR and Spacer 2
MVLQTQVFISLLLWISGAYGDIQMTQTTSSLSASLGDRVTISCRASQDISKYLNWYQQKPDGTVKLLIYHTSRLHSGVPSRFSGSGSGTDYSLTISNLEQEDIATYFCQQGNTLPYTFGGGTKLEITGSTSGSGKPGSGEGSTKGEVKLQESGPGLVAPSQSLSVTCTVSGVSLPDYGVSWIRQPPRKGLEWLGVIWGSETTYYNSALKSRLTIIKDNSKSQVFLKMNSLQTDDTAIYYCAKHYYYGGSYAMDYWGQGTSVTVSSGGGGSGKPCPPCKCPAPMFWVLVVVGGVLACYSLLVTVAFIIFWVKRGRKKLLYIFKQPFMRPVQTTQEEDGCSCRFPEEEEGGCELRVKFSRSADAPAYQQGQNQLYNELNLGRREEYDVLDKRRGRDPEMGGKPRRKNPQEGLYNELQKDKMAEAYSEIGMKGERRRGKGHDGLYQGLSTATKDTYDALHMQALPPRSGATNFSLLKQAGDVEENPGPMLLLVTSLLLCELPHPAFLLIPRKVCNGIGIGEFKDSLSINATNIKHFKNCTSISGDLHILPVAFRGDSFTHTPPLDPQELDILKTVKEITGFLLIQAWPENRTDLHAFENLEIIRGRTKQHGQFSLAVVSLNITSLGLRSLKEISDGDVIISGNKNLCYANTINWKKLFGTSGQKTKIISNRGENSCKATGQVCHALCSPEGCWGPEPRDCVSCRNVSRGRECVDKCNLLEGEPREFVENSECIQCHPECLPQAMNITCTGRGPDNCIQCAHYIDGPHCVKTCPAGVMGENNTLVWKYADAGHVCHLCHPNCTYGCTGPGLEGCPTNGPKIPSIATGMVGALLLLLVVALGIGLFM

SEQ ID NO: 5087 - protein, 845 aa, Artificial Sequence
  CD19 CAR and Spacer 3
MVLQTQVFISLLLWISGAYGDIQMTQTTSSLSASLGDRVTISCRASQDISKYLNWYQQKPDGTVKLLIYHTSRLHSGVPSRFSGSGSGTDYSLTISNLEQEDIATYFCQQGNTLPYTFGGGTKLEITGSTSGSGKPGSGEGSTKGEVKLQESGPGLVAPSQSLSVTCTVSGVSLPDYGVSWIRQPPRKGLEWLGVIWGSETTYYNSALKSRLTIIKDNSKSQVFLKMNSLQTDDTAIYYCAKHYYYGGSYAMDYWGQGTSVTVSSGGGGSGGPTIKPCPPKCPAPMFWVLVVVGGVLACYSLLVTVAFIIFWVKRGRKKLLYIFKQPFMRPVQTTQEEDGCSCRFPEEEEGGCELRVKFSRSADAPAYQQGQNQLYNELNLGRREEYDVLDKRRGRDPEMGGKPRRKNPQEGLYNELQKDKMAEAYSEIGMKGERRRGKGHDGLYQGLSTATKDTYDALHMQALPPRSGATNFSLLKQAGDVEENPGPMLLLVTSLLLCELPHPAFLLIPRKVCNGIGIGEFKDSLSINATNIKHFKNCTSISGDLHILPVAFRGDSFTHTPPLDPQELDILKTVKEITGFLLIQAWPENRTDLHAFENLEIIRGRTKQHGQFSLAVVSLNITSLGLRSLKEISDGDVIISGNKNLCYANTINWKKLFGTSGQKTKIISNRGENSCKATGQVCHALCSPEGCWGPEPRDCVSCRNVSRGRECVDKCNLLEGEPREFVENSECIQCHPECLPQAMNITCTGRGPDNCIQCAHYIDGPHCVKTCPAGVMGENNTLVWKYADAGHVCHLCHPNCTYGCTGPGLEGCPTNGPKIPSIATGMVGALLLLLVVALGIGLFM

SEQ ID NO: 5088 - protein, 6 aa, Artificial Sequence
  Linker
GGGGSG

1-154. (canceled)

155. A polynucleotide comprising a nucleic acid sequence encoding a chimeric antigen receptor (CAR) comprising
(i) an antigen-binding domain that binds to an epitope on a tumor antigen expressed on a target cell;
(ii) a transmembrane domain;
(iii) an intracellular domain; and,
(iv) a CAR spacer located between the antigen-binding domain and the transmembrane domain comprising an amino acid sequence derived from a human immunoglobulin hinge and/or constant region or a functional fragment thereof,
wherein
(a) the CAR spacer is between about 150 amino acids and about 125 amino acids in length; and, the distance between the epitope and the surface of the target cell membrane is less than about 10 Å;
(b) the CAR spacer is between about 125 amino acids and about 100 amino acids in length; and, the distance between the epitope and the surface of the target cell membrane is less than about 10 Å;
(c) the CAR spacer is between about 100 amino acids and about 75 amino acids in length; and, the distance between the epitope and the surface of the target cell membrane is less than about 10 Å;
(d) the CAR spacer is between about 75 amino acids and about 36 amino acids in length; and, the distance between the epitope and the surface of the target cell membrane is less than about 15 Å;
(e) the CAR spacer is between about 35 amino acids and about 21 amino acids in length; and, the distance between the epitope and the surface of the target cell membrane is between about 15 Å and about 25 Å;
(f) the CAR spacer is between about 20 amino acids and about 16 amino acids in length; and, the distance between the epitope and the surface of the target cell membrane is between about 25 Å and about 35 Å;
(g) the CAR spacer is between about 15 amino acids and about 11 amino acids in length; and, the distance between the epitope and the surface of the target cell membrane is between about 35 Å and about 45 Å; or,
(h) the CAR spacer is between about 10 amino acids and about 5 amino acids in length; and, the distance between the epitope and the surface of the target cell membrane is more than about 45 Å.

156. The polynucleotide of claim 155, wherein
(a) the distance between the epitope and the surface of the target cell membrane is less than about 10 Å and the CAR spacer is 125, 126, 127, 128, 129, 130, 131, 132, 133, 134, 135, 136, 137, 138, 139, 140, 141, 142, 143, 144, 145, 146, 147, 148, 149 or 150 amino acids in length;
(b) the distance between the epitope and the surface of the target cell membrane is less than about 10 A and the CAR spacer is 100, 101, 102, 103, 104, 105, 106, 107, 108, 109, 110, 111, 112, 113, 114, 115, 116, 117, 118, 119, 120, 121, 122, 123, 124 or 125 amino acids amino acids in length;
(c) the distance between the epitope and the surface of the target cell membrane is less than about 10 Å and the CAR spacer is 75, 76, 77, 78, 79, 80, 81, 82, 83, 84, 85, 86, 87, 88, 89, 90, 91, 92, 93, 94, 95, 96, 97, 98, 99 or 100 amino acids in length;
(d) the distance between the epitope and the surface of the target cell membrane is less than about 15 Å and the CAR spacer is 36, 37, 38, 39, 40, 41, 42, 43, 44, 45, 46, 47, 48, 49, 50, 51, 52, 53, 54, 55, 56, 57, 58, 59, 60, 61, 62, 63, 64, 65, 66, 67, 68, 69, 70, 71, 72, 73, 74 or 75 amino acids in length;
(e) the distance between the epitope and the surface of the target cell membrane is between about 15 Å and about 25 Å and the CAR spacer is 21, 22, 23, 24, 25, 26, 27, 28, 29, 30, 31, 32, 33, 34 or 35 amino acids in length;
(f) the distance between the epitope and the surface of the target cell membrane is between about 25 Å and about 35 Å and the CAR spacer is 16, 17, 18, 19 or 20 amino acids in length;
(g) the distance between the epitope and the surface of the target cell membrane is between about 35 Å and about 45 Å and the CAR spacer is 11, 12, 13, 14, or 15 amino acids in length; or,
(h) the distance between the epitope and the surface of the target cell membrane is more than about 45 Å and the CAR spacer is 5, 6, 7, 8, 9 or 10 amino acids in length.

157. The polynucleotide of claim 155, wherein the tumor antigen comprises ROR1, HER2, AFP, TRAC, TCRβ, BCMA, CLL-1, CS1, CD38, CD19, TSHR, CD123, CD22, CD30, CD70, CD171, CD33, EGFRvIII, GD2, GD3, Tn Ag, PSMA, ROR2, GPC1, GPC2, FLT3, FAP, TAG72, CD44v6, CEA, EPCAM, B7H3, KIT, IL-13Ra2, mesothelin, IL-11Ra, PSCA, PRSS21, VEGFR2, LewisY, CD24, PDGFR-beta, SSEA-4, CD20, folate receptor alpha, ERBB2 (Her2/neu), MUC1, MUC16, EGFR, NCAM, prostase, PAP, ELF2M, Ephrin B2, IGF-I receptor, CAIX, LMP2, gplOO, bcr-abl, tyrosinase, EphA2, fucosyl GM1, sLe, GM3, TGS5, HMWMAA, o-acetyl-GD2, folate receptor beta, TEM1/CD248, TEM7R, CLDN6, GPRCSD, CXORF61, CD97, CD179a, ALK, polysialic acid, PLAC1, GloboH, NY-BR-1, UPK2, HAVCR1, ADRB3, PANX3, GPR20, LY6K, OR51E2, TARP, WT1, NY-ESO-1, LAGE-la, MAGE-Al, legumain, HPV E6,E7, MAGE Al, ETV6-AML, sperm protein 17, XAGE1, Tie 2, MAD-CT-1, MAD-CT-2, Fos-related antigen 1, p53, p53 mutant, prostein, surviving, telomerase, PCTA-1/Galectin 8, MelanA/MART1, Ras mutant, hTERT, sarcoma translocation breakpoints, ML-IAP, ERG (TMPRSS2 ETS fusion gene), NA17, PAX3, androgen receptor, cyclin Bl, MYCN, RhoC, TRP-2, CYP1B1, BORIS, SART3, PAXS, OY-TES1, LCK, AKAP-4, SSX₂, RAGE-1, human telomerase reverse transcriptase, RU1, RU2, intestinal carboxyl esterase, mut hsp70-2, CD79a, CD79b, CD72, LAIR1, FCAR, LILRA2, CD300LF, CLEC12A, BST2, EMR2, LY75, GPC3, FCRL5, IGLL1, CD2, CD3c, CD4, CDS, CD7, the extracellular portion of the APRIL protein, and any combinations thereof.

158. The polynucleotide of claim 155, wherein the CAR spacer located between the antigen-binding domain and the transmembrane domain comprises an amino acid sequence derived from a human or mouse immunoglobulin hinge and/or constant region or a functional fragment thereof, wherein the immunoglobulin is selected from the group consisting of mouse IgG2, human IgG1, human IgG2, human IgG3, human IgA1, human IgA2, human IgD, human IgE, and human IgM.

159. The polynucleotide of claim 155, wherein the CAR spacer comprises an amino acid sequence having at least 70%, 75%, 80%, 85%, 90%, 95%, 97%, 99%, or 100% sequence identity to
(i) a mouse IgG2 sequence selected from the group consisting of SEQ ID NOS: 4830, 4831, and 4832;
(ii) a human IgG3 sequence selected from the group consisting of SEQ ID NOS: 4833, 4834, 4835, 4836, 4837, 4838, and 4841;
(iii) a human IgG1 sequence selected from the group consisting of SEQ ID NOS: 4839, 4840, and 4843;
(iv) a human IgG2 sequence of SEQ ID NO: 4842;
(v) a human IgG1 sequence selected from the group consisting of SEQ ID NOS: 4839, 4840, and 4843;
(vi) a human IgA1 sequence selected from the group consisting of SEQ ID NOS: 4844, 4845, 4846, and 4847;
(vii) a human IgA2 sequence selected from the group consisting of SEQ ID NOS: 4848, 4849, 4850, and 4851;
(viii) a human IgD sequence selected from the group consisting of SEQ ID NOS: 4852, 4853, 4854, and 4855;
(ix) a human IgE sequence of SEQ ID NO: 4856;
(x) a human IgM sequence selected from the group consisting of SEQ ID NOS: 4857, 4848, and 4859.

160. The polynucleotide of claim 155, wherein the CAR spacer further comprises an N-terminal Glycine/Serine linker selected from the group consisting of the sequence GGGSG (SEQ ID NO: 4818) and the sequence GGGGSG (SEQ ID NO: 5088).

161. The polynucleotide of claim 155, wherein the antigen-binding domain comprises the six complementary determining regions (CDRs) derived from the R11 antibody, R12 antibody, or 2A2 antibody.

162. The polynucleotide of claim 155, wherein the antigen-binding domain comprises:
(i) VH CDR1 of SEQ ID NO: 4888; VH CDR2 of SEQ ID NO: 4889; and VH CDR3 of SEQ ID NO: 4890; and/or VL CDR1 of SEQ ID NO: 4892; VL CDR2 of SEQ ID NO: 4893; and VL CDR3 of SEQ ID NO: 4894;
(ii) VH CDR1 of SEQ ID NO: 4896; VH CDR2 of SEQ ID NO: 4897; and VH CDR23 of SEQ ID NO: 4898; and/or VL CDR1 of SEQ ID NO: 4900; VL CDR2 of SEQ ID NO: 4901; and VL CDR3 of SEQ ID NO: 4902; or,
(iii) VH CDR1 of SEQ ID NO: 4904; VH CDR2 of SEQ ID NO: 4905; and VH CDR23 of SEQ ID NO: 4906; and/or VL CDR1 of SEQ ID NO: 4908; VL CDR2 of SEQ ID NO: 4909; and VL CDR3 of SEQ ID NO: 4910.

163. The polynucleotide of claim 155, wherein the antigen-binding domain comprises a VH and a VL, and wherein:
(i) the VH comprises SEQ ID NO: 4887; or the VL comprises SEQ ID NO: 4891;
(ii) the VH comprises SEQ ID NO: 4895; or the VL comprises SEQ ID NO: 4899; or,
(iii) the VH comprises SEQ ID NO: 4903; or the VL comprises SEQ ID NO: 4907.

164. The polynucleotide of claim 155, wherein the CAR comprises an amino acid sequence set forth is SEQ ID NO: 5061, 5062, 5063, 5058, 5059, 5060, 5049, 5050, or 5051.

165. A vector comprising the polynucleotide of claim 155.

166. A composition comprising the polynucleotide of claim 155.

167. A CAR encoded by the polynucleotide of claim 155.

168. A cell genetically modified to express a CAR, comprising the polynucleotide of claim 155.

169. The cell of claim 168, which comprises a T cell, a natural killer (NK) cell, an natural killer T (NKT) cell, an ILC cell, a macrophage, or an antigen presenting cell.

170. A pharmaceutical composition comprising the cell of claim 168.

171. A culture medium comprising the cell of claim 168.

172. A method of treating cancer or providing an anti-tumor immunity in a subject in need thereof comprising administering to the subject an effective amount of a vector, composition, cell, or pharmaceutical composition comprising the polynucleotide of claim 155.

173. A method of preparing a population of cells for a therapy comprising transducing a population of cells isolated from a subject with a polynucleotide or vector comprising the polynucleotide of claim 155.

174. A method of generating a persisting population of genetically engineered cells in a subject with cancer, the method comprising administering to the subject a cell genetically engineered to express a CAR encoded by the polypeptide of claim 155.
